United States Patent Application Publication US 2022/0008368 A1 - sequence listing, part 14

SEQ ID NO: 2 - DNA, 58617616 bp, Homo sapiens (residues 28,223,300-30,394,322 of 58,617,616)
  modified_base (1)..(60000): a, c, t, g, unknown or other
  modified_base (24448981)..(24498980): a, c, t, g, unknown or other
  modified_base (24552653)..(24552752): a, c, t, g, unknown or other
  modified_base (24891257)..(24891356): a, c, t, g, unknown or other
  modified_base (24895791)..(24895890): a, c, t, g, unknown or other
  modified_base (24898314)..(24904771): a, c, t, g, unknown or other
  modified_base (24908590)..(24908689): a, c, t, g, unknown or other
  modified_base (27190875)..(27240874): a, c, t, g, unknown or other
  modified_base (58607617)..(58617616): a, c, t, g, unknown or other
cttgctctaccacccctctgcaggcaagcagcatcaggcaaggtggggctttctcctctcttgttctggactctctgtgtttgtcagttcagccaaaagttccccttaactacctcaaaatcatttcagatcttgataaaattgaacaggagtctgccattgaacccttgtcagtaagaacaaaaactgtagcagcagctgcgtgtctctttcctgagaaccgaatagggactcctttgggtgctgttttcagataatacagcttcttcaatgtgacacacaggagtcccacccggtagcaggggtgcattttgagttctttgacagtactgttatcagatcttggtcaccatcctagaccaagatacccacattctgaaggcattggggtatcagagaaactccttacagtttccgagtttgaggccatttttcttcctcttcactaataaatacacgaagattgggatttgtgtgtgttgagctcattttaataacaggcaacaataactgtcctgtttggcctcagcaaaaagtccagaaagatgctagagtattccatgagtatgatacagaggtgaaaggagatacgcaagaatctccttttcaaggtttacattctggagtatcccaggtcacgttttctaacagcaagcctgagacagggattcttgtataagtaatcatttgagagatgctctcaggtgagtttgctagaaaatgagggaaggagaagcagccgcgtgctatcagcagaagtctcttttccacccgattctatgggttctctggagcgtgaatttcaccacagacatgagcaaggtccatccttgtaaggggagaaaagaggggcagtgcctaaccctcagacatcaacagcagataactattctcctaaaaaggtgcaggtgtgagccattttcagctgacacccacagcaggcgagaagtggttgcactggccagataaaaggctcctgggtggggtaccaacagtggctactgtagggggagacctgtccctgagctaaggcagagggaggagcagagtcctgcagcacagccatggccacttgggcctcccagtgtgtaccagggcttctgcatccctccaacatccattcaatactcattaatgcacctgtgctatgtaccaagcactgtgccagactctggggacacagcactgttggcgccagacgtggttcctgcgcccacgcagcctacatctcacagaagtgaaaatcattgagcatggacaacgccggcaggaacttcaaggcatggcagtggagcatcatggctaggagcatggactctggactcttggttccttgtgggtcagccatgtgacctcgggtgagtgactcatcctttttaagcttttgtttcatcgtggagaagaaaatggcccccacttacttttaagatttggcgtatgcgtgaagattaaaccagataatgcatgtgaggtacttagctcaagacctggcccagagctgcttcctagtaatgtgaaataattataataataatgttatcattgttgttataacattggttacaaccattcaggaagatggtttctcaatgactgttctctttgtatttctttgtgcactgaatcatgccctgtggcgggcactgtgctgggcctgaggtcatggtggagggcataggcagtgacactctggctcagtgtcctgggggaggtgtctgactcctccccatctccttaaattcacttcatctttgcaccagccagctctcctttcctcaccagggctattatcaaattttgaaaatttctagcagttttccttaaatattaatttcattttttgctttttcttttttttcaacttttattttagaatcagggagtacatgtgcataattgttacagaagtgttaacatattgcataatgctgatatttgaggtatgatggaacccttcacccaggtagtgagcatagtacccaacaggaagttttccagcccttctccctccatccctccttctcccttttcatagtccccagtgtctactgttgccatctttatatccatgtgtccgcagtgtttagctcccacttacagttgagagcatgcagtatttgactttctgttcctgcattaattcacttaagattatggcctctaattatattcacgttgctgcaaaggtcatgattttgttcttatttatggctgcatcatatttcatggtgtgtatgtaccacattttctttaatccaccattgataggcatctgggttgggtccatgcatttgctattgtgactagtgctgtgatgaagatatgggtgcatgtgtccttttggttgaatgatttattctactgtggttatatgcccagtaatgaggttgctgggtcgaatgatagttcaacttttagttctttgagaaatctccaaagtgccttccactgtggctggactaatttacattcccactcatggtgcataagtgtctgcttttctctaacaaaagccattctgattggtgtgagttggtgtctcactgtagtttcgatttgcatttctcagatgattagtgatcatgagcatttttcatatgttttaagcattaattttaatttctgagaacaaggctggaatattcatctcaagaatagctgatccaatccagtgtgtcataaacatggaggcagagataggcactatatgtttctaagcaggtctgaaactctgctcagagactgcgctggacaggtctcccagatcttcaaaaagtatctgtggttcctcccctcttcacacacagacaaacacacatacacaaacccaagataacattttttcctccaatacccagggagctctgaccgcaggtttggctgcccagtgcttatgaaccatgtctccgatgattttataatctcctccattaactgcactaacattttaatgagtcttggcatcaagtagttatctgcagattttctggtaaacatgcagtagaaaagttaattttttaaaaaatcacatatttttcctacaaaactcagtgtaagaagaatctgaatgatctgtgcttctagaatacttttttttgtattagtttattcatatagctatttgctcttctcctaggactttattgtggcagggtggggtctttaagacctctgtatcacatcactttcaggaagtggatctatggagaatgcagcccctttactcaacacctccaagagccggagcctgtaaaataggcaggaaccgacaaactgcagcaggaaagaaatataaaacataaatagaaaatgattatctcatcaagtagccatgcccgagtccacgatgcattggctcagctctgctcctacatccaacagaaagttccttgcttttcatgaaagagctccttgtgcagtctgatcattcacaagaccatttaattccaaatacaattcggccactaatttcaaactgttatcaaatgtgacagacaggtttgtttttagctcccagtagatgaatggtctgctttaaaattgaacagataacaaaggagatcaggactgagaggcgctagagaaatgaaaacattttctagctcccagtagccaagctaaatctttgcttttttggcaggttactcctcaattaaacatataaaggcaaaagagccagcaggaccatcctgaagcaagctggatttgtgccgttcagctgtgtgtcacagccagccccaggggccagggattcctaatcaacattctcccatgcagacatgggcagggcttttattttagagggtcttaaagaactagaattacatattcctttttagaaatatcaagtgcatctttcctcaggttctctgcaccaacattttttctttctgaccggacattttatatatatatatcagaaaaataatcagtctgcctagaattcccaccttttgactgacaggaagcaccttatcaatgatagcctagctttgtctgaaatcccatctgttttcagacaaacacaatctctacatttttaagagacctgatgctaaaatatgaattacagctttggggacagccattcccaacacacatgaacaaaagaaactaatatatagcatattcaaaactgatactcttcaacctttcttccttgatgcaatgtcagtgagcctcggcatccctccagggtgagggcagatataatagggtagagatagatcgcattgtgcaatgtcaatatcaatttgaaccacctgctgttccttatttattcttatcattgattctacaactttttgcccatatcatgcagttaaattcttcctaatatgacaagccttaaggatttatagacattttcacatgctatagcaaattaccattcttgctagagttctggtaacaacccccagtgggaaatggtaccaaaaaaattgaagatactatcaaagtgatccccggctgctgagatggaaatgaacacgagtcatttttagttaacatcaaaatgaaaaacttaagtcgcagccacatctcagagtgtacgagaaaaacaaatcatagttctcttctatgctgctggcttttaaagattaaccttgaaaggaaaggggacaaaacaaaaagttggtttatgctatatacagtatatagtgccctccatcaacaacgcagggactcacttatttcttggtgagtccgcacttccttctgggtcgctctattccacctcaatttttactttaatattaatatccatacattgacaaacacaccgatgttctcccacacaagacctagcattcagatagtgacttaaacctgcttcttttttcttgcagatgttcccgagactgtggacttgggccttgccaaggctgacaccagaaatgactgcacatatttaggagtaaagaacacaggaacagaaaccaaataccgtatgttttcactcataagtgggagctaaatgatgagaacacatggacacacagaggggaacaatgcacactggggcctattggaagagttgcagggggcaggagggagaggatcaggaaaaatacctaatgggcactaggcttaatacctgggtgatgaaataatctgcacaaaaaaaccccaggacccaagtttacctatccaacaaacctgcacttgtacccctgaagttaaaataaaagtttaaaaattttaaaaaaacaaaacaaaaagaacaggacttataggagacccatcgccaccatcacccggccctataccacatgcccctcttcttcctggctccatccacagcctctccctccagccggcccaccaggtgccccagatgaggttcacctccctaaggccacgtgtgctgcagcttggtcatggatcttttgtggccggcttgagcttggtgatttctgtgagcatctggagggcagagctgaggtctgattaagtcatgcttcttcccaggtcaccctacaccaacatggcaaaggcagcctttagttatttacttcagttttgttgttgttgctgttttttaatattaggtggaaccacataaaatcaacaatattcagccattgttgactcagtccattgagtgtcactcagtcccaggctgaaagcctgagaatctggggccactggtgcaagtctcagagtctaaagactagtgaacacagactgtcaaggacaggagaagaaggatgtcccagctccgagagagagagagagaaaggagaaagagagagagagagagacagagagagagaatggcttttactctgctttttcatcctatccaggtctcagctgaccagacagtgccttcccacattgagggctgatctgcaaaactggcaatttcatatgacttattttaatggatgaaacaaatgagtccatggcatccattccttgtaatgctaactttctcaagcgcctagagtcaagttttttctaggctgtatgaaattttacacaggtcctaagattgtacacattgtcttttatttgcctgactaataggttgcctggtaatgaggacttattggcccaacaagctgccagtgaaccagaatgctttaaacacaaggcaatggcagaagcccaccccagctcagagaggagcttctacttagccccctggagcttcatgatgttttcttcctcttaatggcaaaggtacaaatctccactctgctgttgctgccaagaaacacaagttccttaatgaccttttatattttcactttttctctaccttctctccattcttagagctaaaatgagaaaagaaaaagcttttttcgttgaaggcagttgaaaacttaaattaagacaataatttaaattttcttcactatttttatttttattttttttagatggagtctcactctgtcaccaaggctggagtgcaatggcgtgatctcagctcaatgcaaactccgcctcccaggttaaagcaattctcctgccacagcctcccaagtagctgggattacaggcacccaccatcatgaccggctaattttttatttttgtagagacggggtttcaccatgttggccaggctggtcttgaactcctgacctcaggtgatctgcctgctttggcctcccaaagtgctgggattacaggcatgagccactgtgcccggcctgcagcttttaatattatcacaactaatcagtcacctgacacatagcacttcacaacacttttaaatttgtcatctcatttgatcccttagatcatttgatccctacgtgatctaagggatgactcttcccatttttcatctgaagagactgaggaattgagagtttcagcgtctttctaaaggtcaccccagcaagcaatacagcaggaggcctttcaaagccagcgccctttgggctggcctcactgtctcttctgggaagagggtgaacactctagaaagagtctccacataagcatagacatgtgcccatgactcaggagcttacggggatcagcaggtgccaattcaagaagacaacacagagcagagagcatggaggtgaaccagggagtgcatgcctcgcctaaagtaccaattatccttaggagtcaccagatgtacacctggtcactcagatgcctaatgtgacacctgacacattaaagaaaaagaaaaaagagcaaggcaagcagcagtagaaaaagaaaaaaaaaggaaaatctctgagtcacaagaaagtggctggaattctagtttaaaaatcatatcatcaatgtaagtctgaggccagcccccctccccccacctcaagactgcacctctccatcacagacactgacccctagctggttccaaataactcaattgcctggaggaagatacagtgtaaagtgcagagttacaactgtatgttcattttttttcttctctgtacagctcatcaaacctaccggcccaggccttatgaatgccttctctcagacccagcagcctgccagggagggcttcaaagggcttcaccatcaaactcattgctcataaaatgagaaaatcttgttattttaaaggcttgtacatctaccatgacatgcttaggcaaagcagacaccaagaagcaccccatgtgctgaaactctagtgaccgcatagggactatttcaattcttagtttgtatttgtttagaggctgcagggaactggccttggtgtgagttctagaaaattaaaaagaggttctaattgtatttcatattgcagcttttatttcaatctcagaagctttcttaaagctcagaaagcttttaaaaagcgtaagaacggtgagaagtaatttcgatatttttgctctttatttagtctattgaagcaggactctccaacttagatgcctatagaaatgtaatgtgagtagatgaagtggtcttgggatattctctcaacagatacttgtgaaagtaaagtctatttccacttgtccattaagctaagaaaggcatggtttcattctaattttcctgaaacatgtgtttctcacaatctttccttcacttctgatagaaacaagagtgttagtttgggtttcctaaacacaaaaatctgagacaagggtttggtaacaagtcatttctctgagaagtgatcctctggtggagagaagtcagacaggacaagagggcaagggaggcaatgaagagcgtgctcccaagcactgtaggcagtcaggctccacctgctctctggaagccgggggctctatgggagaaagaatggagcttgctgcagttactttacctgggggcaaggcggtgaggactcttatttttacccaccaacttctgtctgtcattgtttgttggctgctctgggtagcattaacttcccagcacttctggcctgccccagtgtggtcttgggcatgagaggggagcatggagcaaacatgtagggcaccaagagcatgtgctacagggtcagtgaagagtcaattatcctatctctcttctatcaaacccaaagcacaggaacaatggttaatgagcatctgatgctccattttcatgtcagggatcaacagggagtggtgtaggaggggacaacctggtgagtgtctgaactgtcaagaagggcagtgacaggtcagctccagctgacagtttccatgcaggagtgcaggtgaactttcccaggtcttctctttctccagaaagctaggaatctggctctttatgcaacatatgtaacttataaatgttagcaactaacaaaaaccatgttaacatctgcagggatatgcatctcagggctgaattttcctgtgtgtggccagtttctatcttctgatataaagttttgttttagtacctactctatgcccagcattttcttgggtgatatgaggaacttagacctgtttcaggtcacttacagatgtcctagtgggtggcaaagatagttgcaggatgacttagaacatagcacgcatccatgcaacagacagaaaaaaaaggctgctaagattgaagaggcacaagattttaaagaaaaacaaaacacaactaagccttttattgttgaacttaaagacatccatcaatactgcttgacattaaatgctattgttgaacatatatgggagcttaccgtgtgtggggtacagtaccaacaaagtcaaaaccaagtcaaagaccagagcatcaggcagaagaaagaaggtttagctcacgtggcaggggatagaatacctaaaaatatggaatcaaaattttgacgcaggtgaaggttttttttgacacttttacatctcataagttcttttctgaagccatgctcatgtcaggaattttgtaacctcatggcccactccctgctaatctcagaactcccttgaccaacatgtggtccctaagcctctcccatgtggtgtgtgtgcagggtcctcagatccaggaaggggctgagtcagacattttctccaaaggaacttacatgcacctccagggatgcacaggaccatccactgggcgcaggacaaaaacgttgaacaagaaaagcgtgttaatacatgattgtctctggatctcgctctcagatattttatcagatgaacacatgtcccatgtggttcatgaggtcccttgagagagagaggagtttcatcaatcagaagcaagtgtggtttttgcaggttacttggcttggttagtggacttatggatggtgacatcttgttttaaccaaaccaacattcaccaatggacaggaggcttatgaagattcctacagagaaagctgcagactggagataatattgtttctgagctgaactgaggtttgcacagtaaagccaaacatccacactgaggctttgcagcgggagaaaggaggtcatttatttgcagggcaccaaacaaaaaaaaaatcaggcagctcacgcttaacacctggcctccccaatggctcacaagcatgggtttttaaaggcataagctgagtggaacttgaaatgacttctcagaaacaggactttaaatgggtttttaaatttcaggaaagcagaagttgtaggcaaaaattataaataaatactggagttaatacatttatttggactgaaagatatcttgaagtgagggcttacaggtcttacgtagattcaaagattttcttatctgcaattggttaaggaagagaagctttgtttaaaatgttgaggtcagggaaaaaaatgtgaagtctggcccatggccataacttactccaggaagaaatttagaagagagaaaggtggccagagctcagtcctcagttttcctctctccaaggtctaatccccgtggatctatttggtgggcgtcctcagtagggaatagagtttttgaaacacaactcaggatcatataagatgttatctttagtttctatagaaaccaaacatctcctgattctaacttccttggctattgttttaagctcctatttattaccttcttgcttatcaagttgtttatttacttctcatggatcactgggctccttgaattttccttgaaggaacataggatttttatttattcccatgcttggggtggtggggctggcaggctcctcagaaagtgttcctgcttcatctctttactgatgatacgagcacaatggagcagcaaaacggggtgatagaactccatctcccagtttgagctcctttttagccacattatgaggttaaaaaccatgattatcttattagataactggtccaaaaaggtcagcaaaaatgaacaaaacactcaagtgattttgtatctgttgtcattaataatgataggccctaagtaccaattgtgcctttaaaaattagataaagatagtagtagtacatatttataatttacaaataaataaatattgatctactgggaggacaggctgaaaagtctttactaatggagtgcatgaagaaaactgaactagatgaataaattagttggaacaaataaatgaggaaggaaaataaagtactataaaagggaaaacttctatatcaaggttatttcatcatgagattcaaacaacataattaattacacatatttaacacatcatccaaaataggaaacaaaggaaaacttggacttgaaattaccgatcctccccttatcagcaggaaataaacaaacaaataaaaccagaatcgtgtctgagctttgacaccagtctacagaaggtatatcataaagaaatcgccgttctagttcctgagcctcatcctgaccaaggcagattggagagttggggcaaaagcagagacaccatccaatgaggcactaattttccacaatgttttccccaagtcattcactgacttttcaaaaaacaccgattcaaggcaaagaggcacttttgctgtagaactgggtcatgctgcactgaaattcttctttgcaccaggctctggctgcctctcttgtcctgctgattggctttttaataggctctgtgaggctggttaacttttcagtttgagtcatgcacacaagttcatctgggtgttgacagccgcattcctgtgcccggcttcatagcagttcggagctgcactgtagagcattctccactgagctgagcggaacttgaaatgacttctcagaaacaggacttcaggtttctttaacctatttgctactctttctcagcttaactaacaaatatcttcctgttcctctacgtgtgaacttttttgttgttgttgttgaaatgtatccagtaaatcggaaaaggccaaaataatcttcaggaaaaattatctgatttcagaaaattgcaactatcataagtgtgtgtgtgtgtgtgtgtgtgtgcgcatgaaaatctccatctcctcattctcaaacaaaaaagtcaaggtcaattatgtgtcaataaagcatttttaaaaaatttcatgacttcctaagagcacagtttcaaataggacatttcccccaaagcaacccaaaagtgaacagaggaggagccagctcagctgacctgaccaggtcccattggtctcctctcccatcttttaatggatccacctgaccggaacccactgagaggacgccctgatggctagaggctcacgaaggcttgtgccatcactgtgattctccaattctctaaaagcctgttttcaggaacgtctaggtgtttgacacagttaagtgtttgctaaaatgcaatcgtttcagatcagctgaatagaaattagcaggtggtgaccacattttataatatgatttttgaagaagtataactatttgctttcttcaatttagttttttaaaaaccaacttccttacgagaagcaggtttcaaaagatattccacactaaagttactcatttctctaggatgcttccctcttcctgccacctttgagcttctcagtgctgtgactgtgtcctgctcctctttatacccaacttccctggtgagtaacagttgcctgagaagagtgcagtgattgaagaagaagtaagtgggtgggtggctgatttccattttaacctatctcattaagagctgcatagtgggagagagaacaaagcctttgaagtcagtctgagcctgggctctgatgctcactaactgcataacctctggccggtaacctcgagccctacctcatagggctgttgtgaggagtaaatataagcatgcttgtaatagctttccctgagtctgctcagctccctggctacctcctgttctcccacgtgaacccactgtttatggaggtgactgcaggtctgatcacctaaactaatgaaaggggtgatggagcagatcctagggagccaccacagggcagagaggtgtctgaagagaagacagtaatgctcctctctgcttacctttttttaagtttctgtcaaatgggcctgtttgcgggtggatgcagtacctgcccaagcccctgcccagtcctgtgctaggcactgggtgcacagagtagtcccacccatgggtggttcatgttcagccagcacagcaagccaccatctggcagtgaacacaccggtcatgtccccttgctggaactaatcatggcagccagagagacacaaagcctggctcattgaactgaaaggagaagagtagctccctctcacacatcatgtgcttttacgagaagacaggcacgcctgccgcgtgccccatccagctccaggggcccagctgtgttgtgcaaaggaaggctttagacggaggctgacgagctggctttagatggaggctgacgagctggcttcagaaggagccccctgggcaggaagcggccctgcctctgatcttgaatttgaccaactgtgaaccagaatggagaaagggggatgttcaccaattagctgaaagtaaaactcaactcaaacttcaggagcccaaagtggcgatacctcgagccatcccctggcattcttcttatgggtatgaacagtgctgtgagggtgggcagccactcttgaggggctctgactgccctggaagaaaagaagaaggaaattcaagagctgtgagtgcagtcagaaactccagtgagttccaaaaacacaggaagttgagattcaaggtaaaacagaagagggcaaagaacatctgaatctttcactccactgtatcagtaagtccacatttagatcacgcttcctgagaggagggctatgccttatatatcttttcttatttccccatcgaatagttcccagggcctggctgagtggtagtgactgcagtgacagtaacagccattgcttactgtgtacagctatatgtgagtgctttctagacatcacctcattcaatcttctccataatctagaagtaggtactatttatccctactctgtagatgcagaaaggcagtctcagaatggcagagtgaatgggccaggggtgagggctcacacctataatcctagcactttgggaggccgaggcaggtggatcaccagaggacaggaattcgagaccagcctgtccaacacggtgaaatcccatctctactaaaaatacaaaaaaaaaaaattagccgggtgtggtggtgggcacctataatcccagctattcgggaggctgagggaagagaatcgcttgaacccgggaggcagaggttgcagtgacctgagatcataccactgcactccagcctaggcaacagactgagactctgtctcaaaaggaaaaaaaaaaacgaataacagagtgaatggctcaagattacacagccaggaagaagcagggccagcttcttcccagcgtagctctagtgacttagtctctgcccttactcaccattctgccacctttgacgtaactaaccacctaccatctctgacatgacctccccttctctgtgcagccttaaatgatgtctgcttcatttccagtgggtgtggcctccagaaaaggaaattggaaagaacgtggaactctcaacaacgaaagcaatgaagctgccttgcttaaggaggaaaggatggtggtgaccaagtttccaaccttgctgggtgggacaagggcagagaggagcacccaggacccttcactcatgtgaccagcctgaggcagagcaaatggggctgcttaagggcacagctcttctccctaccgaggcaaactcactgtggaaggggctgtttccaagcacctatgatgttgaaacagcaaagttataaccggtcagaaattgcacctttctaaaaagaaattatgacaattagcccacataaaaacattatttccttcaacataggcttgaaattcaaaaccactatactataataatttttcattttcatgggtgcaataattattgcactagagataatggggcccatactagaaagcagaaacaattgccctggtttaagagcttattaatgaacaatacagccatagtcaattaaggcacaggaaggaaacatggctgctggtgactggtgggttggttgctagatttaatttttgttattgggtcagtaaaggcaggaagaaaatacttctcaagtgggagggaaggaaattacaaatttgatgaaaataaatcaccttttgagcttttgagtctttccaattgaggcttggttaatgtaggtgacagcactttctgcctgtgacttggcacagggttattgggagccatttgtaacactcccattctgtctgtaaaaagacattttaattgaaaaatcatttgcccataaaattattatcatcaatttacagtccaccaaagggctgcattatgaccataaaacaatttgtagtggattcattttactcactaaatcactttacattatactgtgaacagaatgattaaagcaagttagcattttgttggcaaagtaattacattattatgcatttcacccacagagatacttctactactgagtccatttgtcttgttgacagaatatctatatgcattggacagaatgcattttctttagttgatgcaattaattttattcaccagacacttttaaacctaagctaaaatgtttttgtcacagaaatagatttgattggggaacaaaattaatcttgcctacatgatttgtgctcagaaagtttcttccaataactgtgcaaatttgcaaacaagtaaacagggagaaaataataagcaagagcaaaacaaaagcctcaaaaagcaattctcctcctgggtctgttttttaaagtcctctatgtacccaggcaggataaaaatccaaagacaccttgaacaggtggagcaggagatggtggtgaaaagagaggggcttctccaacctgaacaatttggctgggaaaatagtgagcacagattaatcttttaaaaagaccccacacaattgcttgagaagcgcctcagctagtgtctttttgtcaccaactttgtatcctagcggtagaaatgactttggactttcctggggccggtgccaggctctgagtgtagtcaggcttgtgaggcagaagtgaagatctcaggcaccccaactgtgtcccatacaagatgcctaaatgggttgtctaaaaccaaacacgagaagcagaaaatggcttgtcttgcacagtgggcattgggcccacctgtttgccgctggaagtcccaggcttcgaaccgcagtcccctccttgcaagaggcccaggacctcagccaccaccagagggcaggaaaccacatctcactctccctgaagcccccacagcacagggcttggcatgcgcaggtcattctggaaagacttccagattcattccctcattcttcaactcctattttctgagcacctactctgtgtcctaaaaagttcagcagtgagcagaaccctgctctgagcaggctgaccacctgctggagaagtcagacaggtgaagaggaaattaagacacagacagtatggggaggaggttccttatggtgtgggaacagttctgtatcttgattgtggtgatgtctatacaaatctccatacaggtgacaaaatttcctagaactgtgcacaaaaacatgcacacacacaaaaaaatgagtccatgtaaaaactggtgaaatctgagtagaccaggtcaattgtttgagtccaggagtttgaggcagcaatgagttgtgattgtgcaactacactccggtctgggccacagagcaagaccctgtctctaaaattaaaaacaaattccaaagtgtaaacaaaaactgaacaaatcagcaacttatttgtccatcgtagtctagtagttaagcacattgtgccaatgccaagttcctgattttcataatgcactacagttatataaaatattgccataggtggaggctgggagatgggtataactctgcacttgttttgcaactgctctgatctataactatttcctaataaatggtttaaagaaacactgatgtgcaaagcactgatggaaaacgcaggaggctgcagaagtccaaagaaacgctggattcttgggggcagcagggaaggtttcctggaaaaactcatatcttcccaaaggcaacccagttaagtgcccagaagggtcagcaggaggggaaaagtgaagctgggagtgacaggcagcagaaatggaggtaactgtagcacagacccagtcccaagacattcagattcaaattgtatttaaatgctggagagttttggctaagctgaaatttaaaagagatttaggacccctaaaggggaagattggctgagaggaaaaataatccttcaggtctgaggagtgttggaaggacacgctggaggcccctcctttgtagtcacgtggctagcaggcacctgcaagctgaaacgtgtgggctggagggactgcggcagtgacatgtctccgcagacctggctgccattcctggttcactggctacacccagctccatggcacccatgtctctgcacattttccccatagaacacatgtaccttattctcccaggattctgccaggtagctctgggcttcatcaagacaactgccacctgctgccacacactcccgcacatcacaatggtgaaatatggggcccacaggcaaggtggagggatgagtagtttggctggagaggctttattccatcaagcccctactgttatccatccatctaaatcatacaactcaggttatcaacactccatgaaacaaccactccaaacttcctgctccaggagtttttattatgaagaccatccaagcctaagcaacaagcaaaaccctgtttctacaaaaaaaagaaaataaattgaaaaatttttctggcatgatggcacgtgcctacagtcatgactacttgggagactgagataggagaattgcttgagctcagtagttcaaggctgcaatgacttgtgattgtgcaactgcacttcagtctgggcaacagagaagaacactgtctctaaaaataataaataaataaaagtccaagtgtaaacaaaaactgaacaaatcagcaacttatttgtacattgtaaaaacatcacagctgagcacttataagttccactgggaaagagacacagggtctgcagccccagatacaataagaaaagtgactgctgtctgacactgagctttatacagattcccgtggagtgcacacagcaaccctgtggaggctgatgctgtatcatcatcatgcacattttatagatcagtgcatgcacaaaaaggttagataacttgcccaagggtgtgcagtcagtatgtgctgggaccatgacccaaatgcagggtgttccgttttctcttccactcaagcaccagctcctccactgtttccatgagcatctccactcaccttgcacaagattgacgcctttccagctccccagactggagctaaggaagcttggagtagctaaggaccattccctgcaacacctccagacacacctcctgacctttatgatacacctggaagacaggtgcatcccctgaaatcccttggaccaaggacaagatccttcagtagcccttggtctttcttgagatacagggaagctttgtaagattcccattaatgaaatatttaggtgatacttctctcacttcagaaaacaaatgagaaaaggagttttgcttacagtacattaagttactttaaattactggaagccatttgtagataacttcctggaaaatttgaatatggataaggatatgttactcatcagcctgacactttcataaaataccctccaaatagaacagcagcaaggaaaggagcatatgttttcatctccaatatgggcattctatgaaatgtaagcactgtatcattactgatccctgaaaaactgggtcataatgagtcttgaacttagaaagtcaaaaattaggttctaaaaaaaagtatgctcctctcaccctatctctatcactgaaaattaaaaagataaatttcaaaagccaaaacacatgacccaaactcttgagcattctgtgagtctaattagatgtgctgttgtcttgatttttgtggaaataaaagcagccatcacagaaagaattgaacggttatattatttgtgaaagtagatttatataaagttagtgattaaggctttgtgacataaagtcatctggtcaatgcattcaaaggcccagtcaatcacccacaagttgaacagatgagacaacaatggcaaagactttcttcaaaagtcaccgctagagggggctctagagacatccaccctggctacccatcagcatcatctggggtgcatgttaaaaacaagatgcctgagagccatcctccaaaattctggttcagtcaccttagggcgtaaccaaggaactggcattttcgtgaagcacccaactcatgcatgtgcagacatccctgagcctgcgaactactcccctatatagctagtcagtctacaaagaggaagctacactggaacacccgccatagagctgtttgcccaaggcctatcttatccggggacagactccttgatggctaaccctgtcctaacacaccctgtccactccatctattttaaattattactgtttttgagtctatcattattaaaggatttaagtttttatattattttagtactttgcatttgaatgatcttttctacagcctctcatctttaaaaagagataaaaatactgcctatgttgtaatctgtaaataagaatgagtgaggtagcccaggtggagttttgcacaggcttgggacataatgtgtgtttaataaatgttggctattacggtgtcattcttgcctgtgacccatcatgtataaggaggaatgaattgtcatcattgcagtggaatacattttggctgcctaggttagataaattgtttaactgtgtgcaatgtccagagattataatttctgctatatggagggctgctgggaaccagagggtatgattgattcgaactttatttcagagactttggttccaagttccaatcctcaaccctcctggccacccacaaagagtcaagaaaatatccaagcatatttccaacatttattggaaacatttattttaaatatatttataatagccaaaaattggaaacaatccaaatgttcatcagcaagagaataaatttcgtatatttatacaatggaatatgacacagaaattaaaaataataaactgctaagaaacacaataacatggataaatcacacagacattgttctcacagctgaacacagtaagccaggttcaaaagactacataatgtatgagggtataattcaggacagtggctacttctgggagatgttaactgggaagaggcaaaaggaactcttctggggagctggaaatgctttatgtcttgtctggttgatgattttagacgtaaaaattaattgagctgtacatttaaaattagtgcactttacaaagtttgctgcatgcattataccttaattaaaaattttttaaagcataagatgcatcttaatgctagtttcaagtgagatttctcacccttttaaactcatctgtgtgtgaacacagcttctcttttacttgcgggtggccccaagtggatggtgggaacaatgcagaataagaaaactttttctcgtcttgtccctcaatttcttattctctcttctctcagtatttctagcttcttttaaagcaccaaatgattattctgtgatcgttaatcagatcgccccactgcctgatttatctgacaaaacagttatttctaaacacctaaactcaatctatccctttccgatgctagcccattactcctcctctccgcaccactgtcctgcatacaagataaatcgctctcagctcagggctgaatgcagtttccatctagaagccaattagggaattgcatttgtttagtctcccaacaacccagatcaatggcagaccctttgatgacttgtgaaataacccaagtaatgggcttgacaatgttgcctcaggaaagattttcagctgaagttgagagaagcagtaaaagtctccttttattcaccaccaagctctatccctcttgactttattcaaaccttgcttcatcttaggcttttctggaagagatattctgggtttcactcttaaaatctgccagctaaaacagagggaaggcccacctgattagctgcctctataatggatttcattaattcgctcacttaatcgttcactaaaaaatcacctatagagcacccgttatgctcagcagacagcagaaaacaaaaccgagtctctgacctcatggaacatatattctagctggagagacataaaataaatgaggtaattttacagaataacaaattacatgagtaaataaaatgagaaagtatgaacaagaatgcccaggaaagtagagacactttatataggactgccagagaagccctctttgaggatgcaacacttgcgcagagacctgaataatgagacacagtcagttatgcacatgctgggaaaatcatcccaagcaaaagaataatcactttcaggggtccaaactctctgtgtgagttctagaaacagagggaaggggaaaccataaagcaaaccctaactttgtcctaccgcctggtctctctacaaggactgcctcctcctttgctattcagcaggggcccttcctagtgccatggcactggctctttctgaaaaaatgccaacgaaaatatcggcaaccaccatgattcattttccaaagtactgttggggtaacccaactcccttgttccaactgaggctgaactgagattcctgaagctctgggagaccaacagcaagactccaattaggcctgaccatgttcaacataaaaagagctgtccctgggaagaaggtgctgatggagacaagctccaaggctgcagcaaagacagcagtgcagatcgataaacacagcacaaattaggatttcattttcaattcttttgtcaagactaattgcatgctcacttcgagtaagatgccctttctgttcagaagcattactgtccaggagaaggtaacacgctggggcttcgaattggcatttcacataatgaggatttcgcagttcaaacaatcactagatattttattctggaaatcgaagctgttagtcaactaaaagtcctcatcctgagctgtgaacatgggcagacattaagcaagcattcggtgacatcactcattccatttctgtcttttcttcccagttctcaggcaccacagatgataacagccactggatccctcaagcacatggaaattcccagaacttcacagatgctcacagatgcatcccatgatcttgacctttgagtaatgggataagcaggtacaaaggagacagaagggccaggctgggtgcttagagaattccaggaagagaaagaggcactagaagtcatggcaggcagcatagagcagtgggtaagtgtacagacctgaggaccagattcgatttccaccgctcaagagccacttggccttacttaagtcacattgtatctctaagtcagcttcctgatctgtgaataagccagacacagaaagaaacatactgcttgatctcacttatattatggaatttcaagaagtcaaactcacagaaacaaagagcagacagtggttaccagggactgaagggtggggaaaatagggagaagttggtcaaatggcataaaccatcagttatgagaataatggtgactatagttaataatattgcatggtctacttgagatttaagagagatcttaagtgtctctccacaaaaaaagtaactaaatggtttacttcacttagcagtctttttggggttcatccgtgttatcacacgtggcaggatttccttcttgtgtggctgaataatattccatcatatataaataccacattccctatatccattcacccattgctagacacttaggttgttgattccataacgtggccatagtgaatgatgctgcaatagccatgggagtgcagatatatctttgatttttttcttttgggtgtatacccagaagtgggattgcagatcatatggtagttctattttttaggaccttccatactgttttccataatagctgtacaaatgtacattcccatgatcagtgcgcaagcgtccccttttctccatgtgcttgccccacatccttcttatcttttgtctttttggtaacagccaactcaccaagtgtgaggtgatatttcattatggtttttgatttgcttttccctgatggttaatgatattgggtaccttttcttgtacttgttggccacttgcatgtcttccttagaaaaatgtctgttgaggtcatttgcccatttttaaatcagatttgtttggttggtagattgctattgagttgtatgtgtttccaacatattttggatattaaccctttatcaaacatatgttttacttttgtctctcagatgaggcatccaggctagctgtgtggcagagcctagctgtgtcagcaggtattgaagcctcagggatgaatgagagaaactggtaaaagaatggagaagaagagatgagagaaacaagccaggacttaattcagagaaattcaacattagaggttcgatttgatatttaatgaatattgcttgtgtgcaaagcttaaatgtcactgtacaaattattttatcacaactatttcatgcatcttgctatttaaactgtccaacattttttggctacaaatatatttaaacatgaatgtctgaatatctgaaatatctagataacttctggcatccacacctttcataatgaccatgaattctcttacactcttccaggaagtagcaaacagatgtgttgctcagtgtgacacaagagaccataggaatgaggctgagaggaaggtctctgcctccatcctgagaggtatcattttcagagggaccccactgaccagatggtgcgatgttcttctctgtctaaatggacaccccaggtatgcagctcagtttgataaaccttgaaacctagtacaggtcagagcctgtggctctcccctcatttactgctcccctcaccaccaagtccctgcctgtctcagatgctcacaccatctggtttctggaggttcctgtaaggaaggccatctgcttcttgttaccatgtcattagaacaattatgacaaaggtgaaacatgaacttgcatgaatcaggcctctctggctcggcttccccatggagaaatatgtactgactttatggtaatttttcatggcaaacctctatctccaagctcctaactctggaaaacagctggaaaataactaagaaacttcaaaaattcaataaatgtcagagttggacctagagcaggagtgacagggagctacatgggatcaaagaggttcgtgttacccattcatagcctagaatgaggcaatcaactaaaaaaaatagaattgcaaatggaagacttttaagtatcaattaggcagggatttgagattaagcatattatctagggctgggcaaggtggctcatgcctgtaatcccagcactttgaggggccaaagcaggaagatcccttgagcccagggttcaagatcagcctgggcaacatagtaagaccccatctctacaataataatattgtagagatagtaaaaccccatctctacagctaataatgataataataataataataataataaattagacaggcatggtggtgcatgcctgtatccaagccactggaaaggctgaggtgggagggtctcttgagcacaggagtttaaggctgcagtgaactgtgattgtgccactgccctccagcctgggcaacagagtgaaactctgtctcagcaaaacaaaacaaaacatttaatgtcattaatcctaaaattcagagaccgccaacactcaaataaagttgggctcacatgcaaagaccaactctccaagaactgggcgtaagatgcatggaggagccaccctccctgcccatctctcctggaaccagcagtttggaatacagaaggggaaatgctagaatagacagctcacctttatttcttacatacttatgatttacaagacttctctgaccattcaagaggcctcagtgccttcattctacattggagtagaataatacgcaaagagatttgcacaaacactttgctagcattgcagcccttactcccccatcaatttagtttgagaccaaatactaaaataccccagcacccagtagcaacctgcttgccagcagagaaagatttgatacaaggtgttttcttttataagagatggttaatcaaatcaggcctgaattatctagatttcatgcattttagcataaaattaattagtttggagaattacgcagtagataaacacaccaaacagctaggcctccttaattgcatgtttacatttttacatccagcttttttcattatcccaaggagctgcctgtagcatgacattcccattaaggaggaggaatccacaaaataatttcatttttctgtctgcagagctcctgataaactgacagtggcttccaagctctccaaatacattttattttcattaaatggctaatctaaaaccaatcaaccaagacatatatagaatgtctgcacagaataagaatgtgtagcttctccagaaagcatgttaaaacaaatccacagcaattattcaggcagacagtacctgataaagggaatctgactgctgcagtagacaccacagcatgggtatagtaatgatggacagactgtaagttgggacctgtctcaccaatatggcggcattagaaacgcaggtgttgtgcttacattgaattactcagtgcaaacagtccacatatggagaagattcacagtcctggaagtatgaatcaaacctcatcacctaacacaggccagctactgctgttcctgaatgaacccaggctaaatctatggaagaaattagtaacgagaagtgagacatcaaactgggtattggtggtgtgaattggtaattggttatatcaacacaaagaccacatgaacaaccacgcttagtgacaagtttccaatgataactgttgtcggccatcatttacaaacggaattagattgttccctttgacgcgcaagtgaaactctttgctgtcaggggctgtgtgctagtgaatggacctagcaccctgacatggcagaagcaagcacagggggcaaagtgaccccatttcccacctaaccgggcagctgtgttctgcttctctcagctgtgcccagtatgagacccagaatttctggaaatgcacttgtatttgtgccaggaatggaggcatttactccatttccaaaatttcttagccctgagtaaaaatacatctacaaagtcaaccccatccacccttttcatgactgtgttaaccaaacaggcacatttatggagcacttattctctctgggagtcagttgtcactgggaagatcacccaagaagaaggacgaaggaagggcctgcctccctcatcacgctgacaggcctacacacctttctacttggcttgagacccagccaacttctttgctcttcctggctgttttcagatacaataaaatcaaaagaaacctcagtggaacaattaactctctggatatatgaaatgccctaggggaagccagattttatatacaagtcttctctgcataggttgcactctcctggattttgtgcttcagtatttggaaggaattatttatgctctgacatgaagctaatgcatgttataaacaaaatctgaatgcacttttcttcctgttgttggtagcctgtgcacctcccaggagcccaggaagcctcttggctgagctaaggacaggcaggcctgtggatgaaacaagtggcacactcactccgtggggtcttcttgtccctgtatcacctgagatgccctggtttgagacatgtgagatgttagctgacttatatgtcagcttttgctgcctaacaaagtggcctcaaacttactggcttaaaagcaacacgcctttattatttctcatgactctgtggtcagctggatggttctggtccagattaggttggctgatctctgcgggacaatctcattggcagtgggtccataacagctggatggtttaggatggcctcacacagacaattggcaggctggaggccagttcccctccttgtggcctcttgtcctcaacagacgagctcaggctcattcacgcagtgacctcagggttctaacagcagcaagagagcgagctgcaatgacaagtgcttctcaagtctctgcttgtgtcattttcggctgatatcctatggccaacaacaagctacgtaatttgtgaccatttttgtgatttaccatagacaattctaagatcacctgcttagaatttaaagagaatcggctaatttaaacatgaaatattaaaactatataagccagacatagaaaagactggcccagtctatgtcttaggctgggtttccccagaagcagactctgagtcaacgacctttgtgcaaatcattttcctgaaaggagaccccagaaagtaactgtagggaagaagggaaatggaggagtagaagggggaaagtatgccggtgatcaggttgttactgcagaaagtggctcagtcccactggggacctctgggaggtgacacagaaagacaccttaaaattctccaacccaggagtccaagagagctgggtatcagtccaccacctcctgtccatcactagttgaggggtgttccagggccatgactccccagaacctctgtccaggctgcacatggcccaagcactgtagtggccagagaaagccctcaggcaggaggtacaggtgagacactgacagcatctgccacagtggaatgacctggacaaggccacctgggcccacacccagcttcggtcattacggtgtgacctctaacaagtttctttatctctctgtgcctgtttcctcataatagtatttatctcataaaattgttaagacaattaaatagatgttattcacttttttaaatatcatgatgtcaacacccaccagggtctgctctcctggaacagacccaggtttctggaaactacttcaggagcccaaaggaaaaaaaatccaaaggtgcttttgctctcagagctgaaagaatttaactcttgattacaggaactgtcaggatttttattaataagtattctgcagtggtgagagacaaatcacagagcataggtaaataagtaggggagaaagcctaaagccaggggaaaacctaaagttagattgcagtggaaatcctcatctcagcacgcctcccacaccaggcaccttagcaaatgctgcatcagagcagagtgctaccagggagaggcagccacctgtgccccatccccagcccatcgtaacttacccagctttaccccttctttccttggtctcctccagaaaagtccttctgggagatggatccattatcacccaagcatctcagcacttcacccgttagcagctgaagccccagaagctctccacatgctgttcagattaacttgggtttgcaggaatttgtttgggatggatgagtctgcaaaacaatcagcatcagtcctgaaattggaagcatgatggactgtgaggaaaacctgtttccagggcttcgctactgaagcctttcctgctttctccccacctcctcagctccctgccggcctttgtagggtcagaaaccctgagcctggcacaccccatggactctctcttttctagcaacagtaatcactaggatttaatgagcactttccttgtgcggacccctgtgctgaatgcccatgtggttgttggcactatggtctcactttacagatgaggactctgaggcacaaccaatcaaagcaggcagaaagtaaagagtcaaacccaggcagacaaaagtcctgttgccacctctgcacgatctgactgcattgcacctttttccatattagtgtgtctgtgcaccttcctcatccccctggctaggctgtaagttgcttcagggcagagtccttggaattcttacgtgtgagggactcagtgaaataatttcattaaattaaatccagcctcttttaccaaatgaaggcatctcttttctgtcatcatttatttcttgcttgagtaaagatagactgtcctgttggtaagcagacctcattgctgggagttctcctatattcttagctgacagccactcctctggctcagaatgattccctcttccatgtgataggccttccagtatgagaagacagcagtcatggcatctcatggtcttttctcctctgtttcagacactctccttctgccatgaaacgcaggtctcctctgccctgggccacttgtctctgaacatcatccctatgaccaatgtgaccttttcaaagctgggtgctcagacctggataagccaaatgtggctgcccagggcataaagtggtgtcttgccaacagctctaccaacatgactggccctcaaaatattttttgtagagtaatagccgaatgtgttgagtaactgggcaaatgacaagcatgacctgaacctcatcattaactttctgagattatgtccttatttgaaaaatggaggtgataatctcagtctttcccacttcaaaggttggcgaagaggaacaaataaaacagcacatatgggaattgcaaaacataattagaagtcatgtgatgtatcaatttaatctcttcactatcacagccaggggaggaccaaacttgccaaccgcttgaggggaaaaagaaggtaggtccattctctagcaacaacaacaaaaaaatctatgattcaatcgagacctaaagacctgacaagcagttggtggaaccaacagggagctcatcctctatgcctacagttgacatcagtcgttttggctgcccattatccttccatccttcttttggtaaaacagtgtctcagcaattttctgggtaaccagccgtccctcactttcacaccaagttaatggaaagggactaactccatgccccagccccaggggtgggctctgattggctttcaccgaatagcatattccaccttcttggtcacagagattggttcgtggatgaacatttccactgacatctcaggccagtaaaaatccagctgaaaacttcttttcaacaattgaaaatagtaaccctctctcttctgctgcatgtgcacaaggaaggctgtagcccctgaagtaccgatagccaccttgagactgaagaaagagcctgccaaagaaatgagcaaacattcctgaaggtgagtcaagaaatagataaagaaagtaaaacctgggtatagtgtttgaagctggatcaagctgtacctgaagtgagacaagccctgtatttttcaattacaggagccaacgaattctctgtaccgttttaccaacttaggtcagattttatgtcacctgatatcaaaaggattcttctgggtaaagtcctctctgtcacttcctacgttttctctgtttccttgtataacttcaagtattataatgcaggaaacagccattcagccatctccaaacagtgagaaagactccatgaacctggtgcaaaccatagagtgccctttctgagaaaatggagatggtagaatctgccttatagagctgttttgaggattaaagaaggtaatgtgtgtaagttgctttgcacattgcacagcacatgttaagtatgcagcctatttttcttttattatccaaaggcactcttctactgtgtccccagcccttcacaaaagcttctaactttaatcacaagagtcatggatgcacaaacacgctaagttacaagtgtaaaatgagaattaaagtcggaccacaaagaagcaacctgcagggaggggccaatgaggaaaggcccctgagcccctgtgagtgtcagtcctggctccttgaagctggtccaatctccataaaggctgccatgcaccatggaacagctgcttttgaggatgtgttagggtttcccagagaagcaaaaccaatacgcacacacaaacacacacactcacttacacacaagtgtaagatgagaattaacatctgaccacacacacacacacacacattaattggctcacaagatcatggagactgggaagtcccatgacatgctgtcacaagcttgggagccaggaaatctggggtgtcattcagtccaagtttgaagacctgagaaccaggggggccgatggtgtaatgtctgagcacagggcaagatgagataagacatcccagctcaacagtgaagcagaaaaataaatgtacttcactaagtccaccaactccaaccccccacagacacaccaaaaataatgtttaaccagacatctaggcatccccagatccagtcagattgacacataaaattatcacaggcagtctttgaaagactcggcaaatttccagaattttggttttaccagcttcaaacagagagagtaaaatcttcctcatcagagtgccctggaatggaggagcctgtgcacccctgggccaagaaactaacacccatctgcccatccttcttttacactagctccaccccaacctaggagatgctccaagtctaaagatgtcttcatcatacttcctccccatcccaagagtcctccttttctccagaggctgcttctggtacccagacagacagtaatagcccctgcatggatgacggacatatcactagatacccccctggcagagtgcatttatagaggtgtctaaccctcctcttaggtacagagagccatatcctttatgcatttgtaaaaatgttcaacatcgtaggtacttaaatgataaattttaaatgtatcttaacatcctcaagtcaccatagtttcagggtctcagcaaattctctatcatcatcatcaataaagccacatgcatcgggtttcccagaactgcttctcagtttccaaaaactgcttttttccagctctgtctgaaaacatctcctttagttttcacttgctttaacctgctatgcaaaaggtatagatttacttaaccaatttacttaaatacttgaccaaatctaacttttactctcctacaaaagatgttcagatttgtcatttcatttacatcttttctgggtccttagaaaatagggtcacattcagtaatgaaatttgttttctctatctatggaaatttgctcctgaagtctgcagccaaaggtgtaggagacagggagaaaaaaaaaaaaaggagaagaaaggaagaaaaagaggagaggaatacagagaaattattttcttgaacactattgtttgatgaaaggtttataaatgcgcataatttttgagactatattttatcagacacactcttacatagtcaattgtaacaatttaaatgttgcttgctttcatggggacaaataataaatttaacaatttaaaaagttatcaagcaagaggataacaatgcagataaggccgggcatggtggctcatgcctgtaatcctaacactttgggaggctgaggcgggtggatcacctgagggcaggagttcaagaccagcctgaccaatgtgatgaaaccccgtctctactaaaagtacaaaaattacccagatgtggtgacagatgtctgtaatcccagctacttgggaggctgaagcaggagaatcgcttgaaccttggaggcagaggttgcagtgagccgagatggcaccattgcactccagccttggcgacagagcgagactccgtctcaaataaataaataaataacgaagataaaagaacatattctggaatgtcattatccagtgacttcaatctcagaaatttcaccgttaggcaaattgagtagcagatttttaggtcttaatggaaaaaaaaagagaaaaaatttgctacttttgggggactatgcttctacccgtccatgcactacttaccttccaagacctgaaatttagacccacatgaccaacccaatggtccacacttgccttgagctcaaggttctcctggtgaaagaaacttcttatagaaatatgtaattgaggtaaagcaaagaagccttactctttacagggactggttctcagctcttgaaagcaaatgtccaagggcctccccatttccaagctggggttggcagggacaggcccacagccagtgcagcctgatgagcccactctatagcaccagccacctggaaactccccacagaggattcactttccaacctcattgtacagtgaagacatctgtgcactcagagcatctgaaggcaagcctgataagcatttgtggattttgtgggtttttttgggcttttttgtttgtttgtttgtttgtttgtttgttgtgagacagagttttgcttttgttgcccaggctggggtgcaatggcatgatctcagctcaccacaacctccacctcccgagttcaagcgattcttcggcctcagcctcccgagtagctgggattacaggcatgcaccaccacacccagctaactttgtatttttagtagagacggggtttctccatgttggtcaggctggtgtcgaactcccgaccttaggtgatccgcccgcctcagcctcccaaagtgctgggattacaggcgtgagccaccatgctcagcctgcattttgttttttaacgaaaagttttggattgtttgtgttttgttttttaagcaactcaggatgagaaagttccaactctattttaagcctttaaatacctcttaactaaagaatgaagtaaatggaaaccacaggcacctgttaacagcccaacgatcagctattttgtattacccgaagccagaaacagcaggcagatggggaaaccaaggtgtacagcaaggtgcagggaattgtttaggttcccaaaattgtggctggcatcagcaggattggaatctaggtccacgacttctaccctgagagacaagagcaggcaggcagtgtggcaccatgaagagagctggattctaaagaggcagtcagtaaaaatccagcacagggcagccaatgtcaccagaaatgcaatctcctctttagaagaggcacgagctccctgctgtcacagagagcattttccatccaataagcagttatggagctgcatttattcccttgtggaaacacataaggaagaacatcctattgtgagcttacagatgccaggacccaagccaactttatgaacaatgacagctcatggcatgtgaatattggtgcatgttccaggaaggagacaaatgctatggtttctctggaaaaagaaaacatggcagcattccacagagaaaaaacaataatgacaaataccctgtccaaagtattacagttatggtcatttcaatggcatagtattgacattgaaatcaataaaagaaatcagttgaatacaattaggaatccagaaacagacctgtgtggaatttagagtgtgacaaacatgacattttgaattggtggcaagaaagagtaaattcacatgacaatattctatccactttggaaaagttaaattagatcaattagattatatacccaacaccatgaacaaaaatattctctggatggcttaatgaactaaatgcacaaaaaccatataagtaatagaagaaactattttttaaatattttgtaatcatttatgttggtgtagggaaaggcatggcatgaaagccagaagccataataggacaaaacagagtgtttatttacactttttaatcttgcatatagcaagtatattaatagaagtcagctttttttttttttttttttttttttttttgagaaggagtctcactctttcgcccaggctggagtgcagtggcgcaatctcggctcactgcaagctccacctcccgggttcatgccattctcctgcctcagccttccgagtagctgggactacaggtgcccgccaccatgcctggctaattttttgtatttttagtagagacggggtttcaccgtgttagccaggatgatcttgatctcctgacctcccccacctcggcctcccaaagtgctggcattacaggcgtgagccactgctcccagctgaagtcagctcttactattggtattaaattctgaaaacaagtctgtttggaacaggctcactgatatccaatagctgctgttactgatgaaggatctgaggcttggagagactggtgtctcagccagggcatttcaggagaaggcaggcaggcaggaaagaacccaggctctgctccctcactcctccactcctcttggtcaaaataactctgaagttagggttaaatagtagggatgaaggctcgtgtttcactctgtacttttcaaagcagtttctctcccattacctcacttggtcagcagaacagcctgtgcaatgggagagcagggtagcttcgatcatctccatttctcagacaaagaaattgaggtatgacagtgagtggctggccctggtcacaagctcctggagcaggggtgtggctggactccacagccctctgttcctggtcagaagtgttcttctttccatcctgctgtctcttgggatgctcgccaatgttttggtgccttcagcagtgaacagcaaaatgcttaccgttcccagacatttcaaagtaaacttgtccatctgacaggagaataagaatcaaagcctccttggaggaaatccagatggcaagcttcttacctccacctttcagctctccacttaattctgtggatggtgctgccaataagccaggcttcatttaactgtcaaaaggacaatgtttcagcagcgttcctgggaataggtgggagggaggagagggctctgggccgtgggtgggagcaaaaagaatgcaggaccccacatccgtgctcactgttcatctgcatctcaacccgtttcattccctggtattttctcttcctgtattcattcctgccatgatgcatgcatacattctaacaggcataaatgtaacaacccagtcaactgtgtatatagattccccgtgagggtacaggcagctcggcttagtttgtgatcatttttatttcattgaaagcctcagagtgtcatcaggtactgttaatttaactgctctatggaatagacccagtttattggagataatggggagagacagtctcagaaaattcaacactgcagagggccctttcctctggagtaatgatcggacacagtgtcaggacgtggcctcctataatgcaccgcaatcgcaatgtaatgatgccttatgaactttaaagttatttccttccgtggagcctgcccttggtgctttctgaaggtgcttgatcatgagagagaagagtgattcactaccggcttttgtaaaacttgtgagatggctgagccagagccctctggccacagagctagaaaggccaggcccaaggtggggctacacagaggccaccaactcaagtcccaggtcatacaggttgctgtcagaccccaatctgccactgatgttggtcaagtgtcataactgtgctgagacaattcacttgcaaatagggacaaatcaaagtaactacctccttgagttgtgggaggattgagtaagaaagtgcttatggcacataagaagtattcagtaagtattgagcattacattatcaatatttactctctatttttttaaataatttcaacttctattttagatttagggcttacatatgcagatttattacaaactatgcatccaacaatggtctaatatccaggctctatcaggaacttaactccacaagcaaaaaccaaataaccccaataaaaagtaggcaaaggacatgaacagatatttctcaaaaagaagacatgcaagtggccaagaaacatttaaaaatgctcaacatcactaatcatcagataaatgcaaatcaaaaccacaatgagataccatctcataccaatcagaggtctattattaaaaagtcatacaataacagaagccagcaaggctgtggagcaaaaggattgcttatgcattgttggtaaaaatgtaaattatttcagtccctgcgaaaaacaatttggagatttctcgaagaatataaaacagaaataccatttgacccagcaatctcattactaggtatatgccaaaggacaataaatcattttactttctatgttttagactgcaaatgtcagcatacttgactggttaaaaagaaaagacagttaattcacatgccatattcttcctccatggtgaaaccatggctaatgcatttcaccttacaagtttttatggaaagagacatacatctgaacatttgtacaatattttttttcacttaaccagacagcgcaatgaaatatttgagaatgtttcatgctaactgttcataaatcagatccgcacactttttttgtgattttacttcactgtttttgccttgtctgtgcaatgcacatcacactcggggccattgttcccctgcctcttttgcaggtttacatgtggcctggaacatcttccatgggttcctcaagagctctccctcctctcctccctgctttgatgtgctgtaggctcccagccttctgcttctccagccaaagaacaccgctaagaaggaaactgtggccctgtaggagcccttgactccttcaccgaggctgatgcatccctcattaggggccctgctcctattcaaggagatcttccctacatctttcttcttccaagtttctatccactgctgtccccttctcccttaggctctgagggtgataggcacatagccatagcaagactcaacaaaaagaacaaatctggtagcatcacattaccctacgtcaaactatactacaaggttatagtcaccaaaacagcatggtaccggcagaaagcaaaaaaaaatgcccttgaaatttttattttttctgtggttttgttttattatataagcatgagcaaaattataatcaacttatgtaatttagaaatgttcaaggggtcttttagttctatcattttatgaattattatttaatatcttggtctcactattttaaaaaaatgccatatgtatacagttttaaaaacctatataattggccaggcaaggtggctcatgcctgtaatcccagcactttgagcggccaaggcaggtggatcacctgaggtcaggagttcaagaccagctcggtcaacatggcaaaaccccgtctctattaaaaacaaaaaattggccaggcatggtggcaggcacctgtaatcccagctactcaggaggctgaggcagggagaattgcttgaacctatgaggtggaggttgcagtgagtcaagatcacgccattgcactccagcctgggcgacagagcgagactccatctcaaaaaaaaaaaaaaatctatataatgaatcatcataaaagaaatgaaaaatacagctgaacaagaagaaaattaaatcactcacaatcatgccacgtatgtatgatgtctttgaaatcaaactgtctatactcacaaactcatatttccttttcatttattttaaaaaattgtaaaaaacattttgtgggtacatttaggtgcatatacttatggagcacaagaaatgttttgacacagacatgcaaagcaaaataattacatcatggagaatggggtatctatcccctcaatcatttgtttttgtgtgtgtgttacaaggaatccaattatagtctgttatttttaaatgtacaattagattatcactgactatagtcaccctgttgtactattaaataatagatctcactcctataattttcatccctacttctcctccaaaattgttgttctcaagcttgccactgattttcactctaataaaggtagacacaattacttagatctcattttatttaacctgtcagcaatgtgtgacccagctgaaaaccctctcctccataatactttcttcacttggctctcagggtctcctggtttttcctcctgctatcccatccatgtaccatcatctattttgcttgcttcttcttgtccccaacctgtcacacattgaagtgttgcaggacccaggccaggatctttctcatgactttcagcaccttgtacatgctaatgacttcccaacgtgtatttccagtccaggtttctttcttgagttccagacatctatatcaaactgcctacttgatacctctttttacttagctgctgggtattgcaatgttatcaggtccaaaattgggctgctgatgttttttgttttgtttttgtttgtgtgtttgtttgttttgtttttgttgtttctgtttgtttttgtttttgttttttgtttgttttgtgtttgttttgtgtttgtttttgtttgttttttgtttggttggttgttttttgtttgttttgtttgtgtgttcgtttttttgtgtgttttttgttttgtttgttttttgtttgtttgtttttgagacggagtctcaccctgtcacccaggctggagtgcagtggcgcgatcttggctcactgcaagctccgcttcccggttcacgccattcttctgtctcagcctccagagtagctgggactacagattcccaccaccacgcccgactaatttttgtatttttaagtagagacagggtttcaccatgttagccaggatggtcttagtctcctgacctcgtgatctgcctgcctcagcctcccaaagtcctgggattacaggcgtgagctatcgcacctggccaatgtttttttttatacctactgctcatgtagtcttcttgcattcatggtaactctcccagcagctctgcctaaagccttcaggtcatccttgacttctttctctctgacacctcacacctaattcatcagccaatagggttaggtctaccttcaaaatacaaccagaagccagtcagatcttccaggtcccagccaccaccatctgttgcctagatgagtgatgagtgactagactgctaattggtcttgtttatttttaatcctcttcccatttattcttaaaagagggtcctattaaaacatgccagattgtgtcattcctctgctcaaaacctttttattattattatactttaagttctaaggtacaggtgcacagcgtgcaggtttgttacataggtgtacatgtgccatgttggtttgctgcacccatcaactcatcatttacattaggtatttctcctaatgctattcctcccccagtgacccaccccctgacaggccccggtgtgtgatgttccctgtcctgtgtccatgtgttcttgttgttcaactccatcgattcccatttcaaatttctttctaatacccaaaaggcagcacatgctctaacctgttttctctttgacttaaacgtctactgttccgttccttttgctctaatccagccacactgagcttcttggaaactttaaagcatgctcagcatgtttccctttgtacctggcagctcactctgtacggagggcttttcccgcagatctgctctcagctcgctgcctccatttcttcagttcttcgatggaaagtcactttctcagcaaggccatatctggccattctaatatttccaccatctctctcctccaacacacatttcattttcctgctttaatttttctcctttaacatatacattttgtttatgctgtttattgttattgtatgttcacttcattctcatgatcaggattttgtctgttcattaccatatccttagtgcaactcaatacatatttattaaataagtgaatagagtttaccgtggtatattattttaaacataaattctcacttaaggaacagtatgacatgggctaattctgacaattttacttggcattatgcacatttgtgggattattttagttatttttaatactctattttctctatatttatattcttccatttaggaaggaaagtccaatattgcggttaatattttttcttttactggttgttatgatagttttaattatggtaaaatgagtcgaaggagttgcaaacttcatttgtattttattagaaataataaaatataagggtgatgaatgcaataaatgtaaaatttgttttcaaaagattatgagccttcaatatctgatataaaaagacacagtttgaatttcttgcttttcatagtaagaaagctattcttgtcaggcacagtctcttctggttaagcagctgctgatgttatacagatttgggggaagagtggaattaaaagcttggccagctctcacaggcgtcagtgggttgatgccacctgcctggtgcagcgtaattatctgagggagactgctatggaatggttggcattcccaggcatgctgattaaggtgagtttgtctctgactggctatctttcagatgcaagcagctgacattgattggttagggaaagagtctagtggtcactgattatgtgtctggatttaaaacgacttctgtgtggctgcttgttattggggctacagatcagactttccttaagtttgaggcaactttcatcagatgttttctgtttcaaagttgccttccatcaactaggttcaaaacaaaaattttttatattccagaaatgtagatgtatttttgaagtttggattaaagaggaattatttaataaccgctctcaaaaagattcccccctcaccttctttaagacacttattctcaattgagagagttatctatatagttatttttcgataaataattattagttttacatgtgtgtgcgtgtgtgtgtgtgtgtgtgtgtgtgtgtgtgtgtgttttaggggctgaggctgaactcctaacatcataatctccagtagaaagttttagtctccttgcaaattaatgtaggttatataatagtgatacaattatgcatgtgtttattttataaaaatataattacaatttttttccaaaaatctacatttttatattaggatcagatacagggctaaaactgtacaaaggcttcaaaattactttattttcaaataatcataagtaatcagaatagtgctatttttgaactacacataatgacatataaatatttttaaagttctccccacactgtatatttcattttttcctttcaggttatatgttttagcttatttttaagaacttgatttaaataaaacattattatattttaaaacaaaacaaaaaacataacaaaaatccaattaggactctcacgcctgtgagtccttgcttgtgggcagtgagctccagcctttgagcgtggtattcaagtttagggtagcattcgtcttgcagtatttgctttcatgtgttttacagttttttgagttcctaggaaactcctagatgcctcgtgcctaacctttgtgctcacattctattctctatgtagaatggttttctcacgcttttttttttggcatcctaactcttacgtatcacattgtatcataattgtatatttacctgtttttaaagcagataatattcattttcttgtatatcgttggaactacatatatatatatatatatatatatatatatatatatatatatatatatatagttcataacaggttttagaatagtaagttaattgaaattgggaacattttgaattttacaaaaaaaagtttttaaaattctttgtcatagagttatttttaaaagattgcctttttaatggatttttttttaagaatactgatacttctttgcatgtgaatgaggtagagaaacatgaaaataaaaactgtacctcaaaacaccctgggattaaacaaatgtttgagaaggccaacttactcactggtggtctgctacaagtgaatgatgacagcagtttaagtaaaataattgaagatgaaggaaggtaaaacttgcaagcttatttccctgtgaaagaatgttagcaatagttactttctctggaaatagaatagtttagtcagccaaggctggaggatcctcaactgtatcaaagctgctgaaagattaaaaattctaatgtaattgaacatgaaaatgatgacctacatgttaaactatcatacatagattattaaaacttataataaacatacaaacacttatgtatgtcaataaatgtgatacattacatcaacagaatttttaaaaatatatatatatataaccatctcaatagatgcagaaaaagcatttgacaaaatctggcattctttatgataaaattgtcttatttcatttaagtttccttcatgtcttttaatggcttgagagctcatttatttttagcactaatattccattgtatggctgtagcacatgttattccttcacctactggaagattagcttcgttgcttcacaaattgattgaatttttatatctatgcttatgagaatttttttgtttaaaatatctttgtctgcttttggttcgtggtgatgctagcattatagaagtttgaatatactcctttttattttgaagggcaaagtttgtgtagaattttattattttttcctacaatgtttggaaggattcaccagcctagctgattgggcctgaaattttatctgtaaaaaggttttcaactgttattttattttattttatggatatgggggaatgtaggttatctattcttgatttatgtttggtaatttaacctttttcaaggaatttttcaattttacctaacttgtcatgtttattcacataaatttaacaatattaccttttttatagtatctgtagaatctgtaataatgtcacattactcaattctaagttactaatttgtatcttctttttttcctgagtaacctagttagacaaaggtttattgcttttattgatctcctcaaagtgtgtagtgttgacttcctctactgtttttcttctctattaatttcatctttgatgatttggtcctttaggctcattattttaaaaaaatcatagcctgagtagcttattaacaaaatgaattgatttcttatggttctggaagttgcaaagtccaagatcaaggtgctgttagatttgatgtctgatgagggactagttcatggttcatagatgcattattttttcctgtgtcctcaaaaggcaaaaggggtgaaggggctttctggggtctcacatgtaagggcattaatttattcataagaacttggcctccattacctaatcacttccaaaaagccccacctctaataacatcagctctgtgatttggttttagtatataaattttgaaaggatccaacattcagatcaccagagatatttatttatttttgtctgcatgctttaagtttagttttatctcctttttactggtttcttaaagtagaagtgaaagttatttgtttgagactcttctaatatagacattcagtgctatatttgtatttaagtatagttgtagctgtattccacaagttttgatatattatgttttcatttttacttagtgcaaaatattttctaatttattttcccttacctctttgactcaggatgggtatttgggtatgtattacttagtttccaaatatttgagtatttcctagagctatttttgttactgatttctgatttgattgatatgcttgtcagggcacatactttgtatgacttatccttttgacttaatcctttttttgagagtaattgtatggcctagagtatgatctatcttggtaagtgttccacaggtacttgaaaagcacagtgttgctcaagactattctattcttgttgattttctgtctccttgttcagtcacttattgactacagggtattaaaacctcaggttactttaaaattgtctgtctgtagttctagatatttatgtctcatatattttgaagctgttatgttaataggggcataaacattttggattatgtcttcttgattgattgaatgctttgtcattgtgacatgatcttgtttattgatgggaatattttttgctatgaaatgtgctttggtattaaggcagccacacctgctcagccttcttctaagtgttagcattctcttttttcaaccttttatccaatttgtgtcttcaaatttaaagcgcatttcttattggcagcatctggttgggtcctgttttgttttgtttttttttaatggagtctgacagtctatattttaactgaggttcttagaccagtgtcatgtgtgatgtaattattgacatacttaggcttacctgtcatcatgctgtttgattactattagccccagctgttctttattccctttttcttttctgctctcttaaagattagtcaagtaacttttcttaatgatttagttttacatttctgttatggcatattaggtataactcttttttatttttatttttgctttcttagtatttgttttagaatttacataattttaacttatcgaagtccaccttcaagtaatattatacaacatcatacatggtataggaaaagtataatagtatagtttcatttcttttctcctagcatatgtacatgtgctcagcaatttttttagatttcagtgtaaagatctttcaaataatttgttcaatttatccctaagtattttatatttttaattctattgtaaatagtattatatttaaaaatttattcctaattatttctaacatgtgaaaataccattgatttgtgcatatttatcttatatcctacaacattgcaaaactaacttactatcttcagtagtaggcttttaaaggatttaattgggatttctacataaatgattatatctgtgattaaagacatttttacttacttcttttctatttagatgccttttatttcccccctttcttgttttccttccttctttctcttctcttttcttttttttaagtttttttgcaataggtagaccttccaggacaatgttgaatagaagtggtaagacctgatatccctgtcttcttgattgtaagagaaagcattcagtctttcatcattatataggatgttagttgtaggtattttaaagatgccctttgaaatgttgagaaaaatcttatgtatcctttatttgatgagattattttttaataagaatggatattaaattttgtcaaatgctctttctgcatatactacacataagtgtatgcttttcctttcattttattaatatagtaataacattaattgattttgaaagagggttaaatattcaacttattaaaataagtgtttaaatgcattttttatttccttaaaaatgtttaaatttgggggaggagccgagatgtccgaataggaaaagctccggtctacagcacccagcatgagcgatgcagaagatgggtgatttctgcatttccatctgaggtaccgggttcatctcactagggagtgccagacagtgggcgcgggtcagtgggtgagcacaccgtgtgtgagccgaagcagggcgaggcattgcctcactcgggaagctcaaggggtcagggagttccctttcctagtcaaagaaaggggtgacagagggcacctggaaaatcgggtcactcccacccgaatactgcgcttttccgacgagcttaaaagagggcgcacccggagattatatcccgcacctggctcggagggacctacgcccacagagtctcgctgattgctagcacagcagtctgagatcaaactgcaaggtggcagcgaggctgggggaggggcgcccaccattgcccaggcttgcttaggtaaacaaagcagccaggaagctcgaactgggtggagcccaccacagctcaaggaggccttcctgcctctgtaggctccacctctgggggcagggcacagacaaacaaaaagacagcagtaacctctgcagacttaaatgtccctgtctgacagctttggagagagcagtggttctcctagcatgcagctggagatctgagaatgggcagactgcctcctcaagtggctccctgacccctgacccctgagcagcctaactgggaggcaccccccagcaggggcagactgacacctcacatggctgggtacgccaacagacctgcaactgagactcctgtctgttagaaggaaaactaacaaacagaaaggacatccacaccaaaaacccatctgtacatcaccatcatcaaagaccaaaagtagataaaaccacaaagatggggaaaaaacagagcagaaaaactggaaactctaaaaagcagagcacttctccccctccaaaggaacacagttcctcaccagcaacggaacaaagctggacggagaatgactttaacgagctgagagaagaaggcttcagatgatcaaattactctgagctatgggaggaaattcaaaccaaaggcaaagaagttgaaaactttgacaaaaatttagaagaatgtacaactagaataaccaatacagagaagtgcttaaaggagctgatggagctgaaaaccaaggctcgagaactacatgaagaatgcggaagcctcaggagccgatgcgattaactggaagtaagggtatcagggatggaagatgaagtgaatgaaatgaagcgagaagggaagtttagagaaaaaagaataaaaagaaacgagcaaagcctccaagaaatatgggactatgtgaaaagaccaaatctacgtctgattggtgtacctgaaagtgacggggagaatggaaccaagctggaaaacactctgcaggatattatccaggagaacttccccaatctggcaaggcaggccaacattcagattcaggaaatacagagaatgccacaaagatactcctggagaagagcaactccaagacacataattgtcagattcaccaaagttgaaatgaaggaaaaaatgttaagggcagccagagagaaaggtcgggttacccacaaagggaagcccatcagactaacagtggatctctcggcagaaactctacaagccagaagagagtgggggccaatattcaacattcttaaagaaaagaattttcaacccagaatttcatatccagccaaactaagcttcataagtgaaggagaaataaaatactttatagacaagcaaatgctgagagattttgtcaccaccaggcctgccctaaaagagctcctgaaggaagcgctaaacatggaaaagaacaaccggtatcagccactgcaaaatcatgccaaaatgtaaagaccatagagactaggaagaaactgcatcaactaacgagcaaaatagccagctaacatcataatgacaggatcaaattcacacataacaatattaactttaaatgtaaatggactaaatgctccaattaaaagacacagactggcaaattggataaagagtcaagatccatcagtgtgctgtattcaggaaacccatcacacatgcagagacacacataggctcaaaataaaaggatggaggaagatctaccaagcaaatggaaaacaaaaaaaggcaggggttgcaatcctagtctctgataaaacagactttaaaccaacaaagatcaaaagagacaaagaaggccattacataatggtaaagggatcaatttaacaagaagagctaactctcctaaatatatacgcagccaatacaggagcacctggattcataaagcaagtcctgagtgacctacaaagagacttagactcccacgcattaataatgggagattttaacaccccactgtcaacattagaaagatcaatgagacagaaagtcaacaaggatacccaggaattgaactcagctctgcaccaagtggacctaatagacatctacagaaacctccaccccaaatcaacagattatacatttttttcagcatcacaccacacctattccaaaattgaccacatacttggaagtaaagctctcctcagcaaatgtaaaagaacagaaattataacaaactatctctcaggccacagtgcaatcaaactagaactcaggattaagaatctcactcaaaaccactcaactacatggaaactgaacaacctgctcctgaatgactactgggtacataatgaaatgaaggcagaaataaagatgttctttgaaaccaacgagaacaaagatacaaaccagaatttctgggttgcattcaagcagtgtgtagagggaaatttatagcactaaatgcccacaagagaaagcaggaaagatccaaaattgacaccctaacatcacaatttaaataactagaaaagcaagagcaaacacattcaaaagctagcagaaggcaagaaataactaaaatcagagttgaactgaaggaaatagagacacaaaaaaccctacaaaaaattaatgaatccaggagctggttttttgaaaggatcaacaaaattgatagaccactagcaagactaataaagaaaaaaagagagaagaatcaaatagatgcaataagaaatgataaaggggatatcaccaccaatcccacagaaatgcaaactaccatcagagaatactacaaacacctctacgcaaataaactagaaaatctagaagaaatggataaattcctcgacacatacactctcctaagactaaactaggaagaagttgaatctctgaatagaccaataacaggagctgaaattgtggcaataatcaatagcttaccaaccaaaaagagtccaggaccaggtggattcacagccgaattctaccagaggtacaaggaggaactggtaccattccttctgaaactattccaatcaatagaaaaagagggaatcctccctaactcattttatgaggccagcatcatcctgataccaaagccgggcagagacacaaccaaaaatagaattttagaccaatatccttgatgaacattgatgcaaaaatcctcaataaaatactggcaaactgaatccagcagcacatcaaaaagcttatccaccatgatcaagtgggcttcatccctgggatgcaaggctggttcaatatacacaaatcaataaatgtaatccagcatataaacagaaccaaagacgaaaaccacatgattatctcaatagatgcagaaaaggcctttgacaaaattcaacaacccttcatgctaaaaactctcaataaattaggtattgatgggacgtatctcaaaataagagctatctatgacaaacccacagtcaatatcatactgaatgggcaaaaactggaagcattccctttgaaaattggcacgagacagggatgccctctctcaccactcctattcaacatagtgttggaagttctggccagggcaattaggcaggagaaggaaataaagtgtattaaattaggaaaagaggaagtcaaattgccctgtttgcagacgacatgattgtatatctagaaaaccccattgtctcagcccaaaatctccttaagctgataagcaacttcagcaaagcctcaggatacaaaatcaatgtacaaaaatcacaagcatgcttatacaccaacaataaacaaacagagaaccaaatcatgagtgaactcccattcacaattgcttcaaagagaataaaatacctaggaatccaacttacaagggacatgaaggacctcttcaaggacagctacaaaccactgctcaaggaaataaaagaggatacaaacaaatggaagaacattccatgctcatgggtaggaagaatcattatcgtgaaaatggccatactgcccaaggtaatttacagattcaatgccatccccatcaagctaccaatgactttcttcacagaattggaaaaaactactttaaagttcatatggaaccaaaaaagagcccgcatcgccaagtcaatcctaagccaaaagaacaaagctggaggcatcaggctacctgacttgaaactatactacaaggctacagtaaccaaaacagcagggtactggtaccaaaacagagacatagatcaatggaacagaacagagccctcagaaataacgccacatatctacaactccctgatctttgacaaacctgagaaaaacacgcaatggggaaaggattccctatttaataaatggtgctaggaaaactggctagccatatgtagaaagctgaaactggatcccttccttacaccttatacaaaaattaattcaagatggattaaagacttaaacattagacctaaaaccataaaaaccctggagaaaacctaggccttaccattcaggacataggcatgggcaaggacttcatgtctaaaacaccaaaagcaatggcaaccaaagccaaaattgacaaatgggatctaattaaactgaagagcttctgcacagcaaaagaaactaccatcagagtgaatgggcaacctacaaaatgggagaaaattttcacaacctactcatctgacaaagggctaatatccagaatctacaataaactccaacaaatttacaagaaaaaaacaaacaaccccatcaaaaagtgggtgaaggacatgaacagacacttctcaaaagaagacatttatgcagccaaaaaacacatgaaaaaatgctcaccatcactggccatcagagaaatgcaaatcaaaaccacaatgagataccgtctcacaccagttagaatggcaatcattaaaaagtcaggaaagaagaggtgctggagaggatgtggagaaataggaacacttttacactgttggtgggactgtaaactagttcaaccattgtggaagtcagtcagtgtggcgattcctcagggatctagaactagaaataccatttgacccagccatcccattactgggtagatacccaaaggactataaatcatgctgctataaagacacatgcacacgtatgtttattgaggcactattcacaatagcaaagacttggaaccaacccaaatgtccaacaatgatagactgaattaagaaaatgtggcacatatacaccatggaatactatgcagccataagaaatgatgagttcatgtcttttgtagagacatggatgaaattggagatcatcattctcagtaaactatcacaagaacaaaaaaccaaacaccgcatattctcactcataggtgggaattgaacaatgagaacacatagacacaggaaggggaacttcacactctggggactgttgtggagtaggggaggggggagggatagcactgggagatatacctaatgctagatgacgagttagtgggtgcagtgcaccagcatggcacatgtatacatatgtaactaacctgcacactgtgcacatgtaccctaaaacttaaagtataataataataaatttttaaaaaatgtttaaatttgagtttaactttaaatcttatattctgttaaaaattttccaagttttatcaattctttttaacattctaaaatatatatgacataaactttaacattttaacaatttttaagtgcacagtttagtttcatcaagtgcatttacaatgtaatgcaacagttactactatccatttctagaacgcttttattatcccaaacagaaactctgtacccattagatattaacttcctgtaagttctaccccagcccatggaaccctctattctaatctctttctctgtaactttacctattccaggtacctcatttaagtggaatcatacaacatttttttgtctgtgtgtctatttcacttagtataatgttttcaaagttcatttatattgtttcaagtatcattacattatttctttttattcccaggtaatattctacctcataaatatcatatttaatgtatcagataatagacatgtggattgtttctaggttttaactattatgaataatgctgctacgaatgtgcacataggcatatgtctctcttgagaaaatactggggagtggaatttctgggtcacatgataactgcatttaatcttgagggactggggaccatcaagttgtttcccaaatcagctgcacaattttacattatcaccagcaatgtaggagggctcccattttttcagatactttccagtctttatttttaatctttttgactgtatgtatcctagtgatgtgaagtgctatctcattgtagctttgacttgcctttctctaatgatgaatgatgttgagcatcttttcatgtggttaatggccatttgtcaatcttattttataaaatatgtagtcagatcctttgagcatattttaattgattgggtttttgttgttgaattgtaagaatgctttatatattctgaacaaaatgtatattactgttttctcataaactttgttctaactcttaatgtcctttgtttctgtattttgaacttttgtttcataaaccacttttttctcaagaatttgccaatagcaccacaatatttctttatgtccatctttttttataatttacttcctcacccaaaaggaaaaaatctatatgcatttttattattcgcccaaaattcccaccccactcacatccactgtattgctataacctacattctctcctggaacaagatatggggaagattaaactttatcttgctgaggtaacctcctttatattatgcatgcattgctttcatgaagttttccacagttgggaaaaccaggcacgttgctgctttgctcaggagcgcaggcttacatgccttgaaaggatgtagtaaaccaacagatggtctaagttactaacaactatcatctcattaattgtcagggttacttataaataaagaaataatttagaacttaaatgtcaaaatattctactacaaagatggcaaatatttgatgaaacctgcaatgtttgttccagatggccaaactataatctagtccctgcctttctcattcaattttttatttttgattttttttacatctttatttgacaaatacatatttccttgttatactatgcttccaggtgacactctgatatatatctcaaatgaccatacacagaattgtgaaagtagttgaggacactcatatcacaaatgaggaaagtcagatcacctcagcagttggctctggaaataggaggaaagagaactatcatcttcctttcatactgagattcaccaattattcaatgtacacaatagaaaccacaaatcaacattagttatttaatacaaaaacactcagtataaagccattgtgagggaaatcatcttttcgaaagtcaattattctagggggaatcttcagcaagaactacataaatcaaaagaagttgacgctgagagaaactcgctttgcccctcatcacattactatctactcgttgacaagaactttaatcttctcacaagtattaagtaaaaacagtgctaactcttcttcatgaactggtttattcccagagctaagacaaggtgtaacttatttggtgtaagggaaacctcacatccattggtccatgtttttgtcagtaaggttaataggtcatcaatgagtatatctagtctccttttctcctctggactctgcagagaagtgtagggcaggtgaagacccttcctgcattggctgggtaaatgttctgtagatgaacatttcttttgttcaggttccaaaatcaagacaaagagaaaacataagaaaatcttttttgtcaaggcaaaaagccctattttctaaatgagcttttaacaggaataacatctttgaatattgatctgacctcttggttttatttctaaattggtttagaactaaaaggggagaggtgtgttatcaatttatacatgaaaagccccaacatccaagaatccatcttaatgtgatctagatatctgagaagcagacataaaatgtatagccctgtttaatggtgattgatacatttccaactgtgttgctgtccataagcaaagtctatgtgcatgtggctggttcatacatttctgtcatagacaccaaggatgccagacaggaccaggcagaagatacaacaggcaatggttttcttttctttttctttcttttttttttttttttgttcacttaaaaatgtccttaatggagcattaaaaataataattttattacttgaaagaccaactgacaaactatggttattcatacttgggtatatgtcataggttttttcaaaaaatcaatgaaaagagcctgtccctccaagtaaaacaactcacggcattctctgccgatgattaaactcacgctttcgagcaaaaaataaaatcttggaaaatttgtatctgccttcacgagcttaatatactaatacttacagatttttctggtgagactgattactcgtgatactaagtaatgtgattttttttaatttttattttattttaagttctgggatatatgtgctgaatacgcaagtttgttatataggtataaatgtgctgtggtggtttcctgcacctatcaaccgtcatctaggttttaagccccgcatgcattaggtatttgtcctaatgctctccctccccttgcccctcaccccccgacaggccccggtgtgtgagatccccctccctgtgtttatgtgttctcattgttcaactctttcttatgagtgagaacatgtggcgtttggttttctgttcctgtgttagtttgctaaggatcatggtttccagcttcatccatgtccctgcaaaggacacgaactcattcacttttatggctgcatagtattccatggtgtatatgtgccacattttctttctccagtctatcattgatggggatttgggttaattccaagtctttgctattgtaaatagtgctacaataaacatacatgttcacgtgtctttatagtagaacgattgataatcctttgggtatatagccagtaatgggattgctgggtcaaatggtatttctggttctagatccttgaggaattgccacactgtcttccataatggttgaactaatttacactcccaccaacagtgtaaaagcattcctattccaccacatccttaccagcatctgttgtttccagacttttaatgctcggcattctaactagcatgagatgatatctcattgtgattttgacttgcatttctctaatgacgagtgatgatgagctttttttcatatgtttgttggccgcataaaatgtcttctttcgggaagtgtctcttcatattcttcacccatttttcgatgaggttgttttattcttgtaaatttgtttaagttccttgtagattctggatattagacttttgtcagatgggtagcttgcaaaaattttctcccgttctctaggttgcctgttcactctgaggatattttcttttccttttttttttttttttttttttttttgagatgagttgcgctctgtcgcccaggctggagtgcagtggcgcgatctcggctcactgcaagctctgtctcccgggttcacgccattctcctgcctcagcctcccgagtagctgggactacaggcgccaaccaccatgcccggctaatttttgtctattttttagtagagacggggtttcacggtgttagccaggatggtcttgatctcctcacctcgtgattcgcccacctcagcctcccaaagtgctgggattacaggtgtgagccactgagcatagctcagcagaagctctttagtttaattagatcccatttgtcaattttggcttttgttgcaattgcttttattcattaagtgtttacctatgcctatgcctatgtcctgaatgttattgacaacagaaaatgattttcacattctgcaggcaagaaggtggacctacgtcttggctgggctgctacttgtaattgtgaagtgccagaaagcaattaccagcttgagtaatgaccagaaatccaaagcatggagactaacaacaaatgtgtccattttcgcttttgttgactatgctatcaaggtcatatcaaaaacagtattgctcagagcaatgtcatggagctttagccctatgctatgctttcttctatcagttttacagttcgactattatattcatctttatttggagttggtatttttatgtggtgtaagggtcaaattttacttttcatatggatatccagttatcccaacaacacttatttaagagactgtcttttttccatactgtgtagctttgcaaaaataagttggctgtaaatgtggagatttatgtccaggttttccgtccagtgcaattgaccaatgtgtctttttatatgctgtactacgctgttttgattacaattcttttaaaatttgtattgaaatcaatatttccagctttgctacttttgctgaagattcatttggttatttggggtcttttgtggttccatacaaatttaagcattattttttcagttctgtaaaaaaaaatggcattggacttttgatagtgattgcattaaatctcttaatggtattatgtacattttcacaatattaattcttccaattcacaaacatgcaatgcctttttatttacttctgtttttgaaattcctttcgttggtgttttatagtttttagtataaaggccttttaccatttagattacatttacacctaaatatttaaatttttataatattctacattagatttttaaatatttcttcagattactttattggtatatagaaacattaccaacatagaaacactactgatttttgtaagttgattttgtaccctgcaacttcactgaatgtgtgcatctgttcccacggttttttgtgaagaagcatttaggtttttttcatatgtaagagcatgtcatcagcaattagagataaattcacttatatattttcataagtttcagatgttttttatttcttgttttgcccgattattctggctaggaattccactaccatgtttaaaataagtgatgagagtgagtatcgttgttttgatcttgattttaggcaaaaagctttcaacttttcagtgtacataatactgtttactgagggcttgtcatatacggcctttctgtggtgagacacatttccactatacttgatttgttgagcattttctccccatcatcttgttctctagtccccactcttattctccactgtcttcttcccactgttcttccctaactccccctctactcctactctctctccccaaagccttcttcccactgtgttctgcttaacaacttcttccctaccgccttccttccccacaccctccttcaccttccatctcccttagcccccaccctcttcttttttattcccccaccctcttctccctcttcattcctgatgctcttcttccccttccctgaccctcttctttcacttttttcttccctgaccctcttctcttcttctccaaccctctttcccttcttccttgaccgctttcttcttctacccttttcttccccttcttccctgacactcttctcctctcccttctactcccaccttctttttcttttttctttaccctcttcttccccttctctcccttcttccttgaccttcttcccctttctccctaactcccttttttaccttcttcccttaccctctttttccctctctttcctttttttcccttttcttccccctcttgttccatcttcttcccagacccccttctcccctctcctcttccccttctttcttcttcttccccgaccctcttcccggctgtcttctcccccaccccaccgtcttctcccacactccctctcgtgtctcctcccctcactccctctccccacagtccctctgcccaaagtcttcttataactgtgttctacccaacaacttctccccaaggtcttcctcctgaccctctttttcccaccccctctttttcagaccatcttctttctgactcccctgcccctcttcaccattttctgtctaactgccttcttccctgccattttctccccattctctcttcccaccatcatcctcacccccttctctgtgaccaccttctccccagaatttttcccccagtgttttctcccccacgatgtcttcttctccacagtctttctcctgaccctcttcttcccaatcatctcccttgttgactccttcccaacccctcatcacagtcttccccccactgtcttcttcccaacattttctccccagaattttatctccagctccccctccaccatcttccctgtacagtgttttatccccaccctctcttcccgacccacccccttctccccagccatcttctcctgaaccactttctcctcaccccctcacgccactgtctaccccaacactccctctccactttctctccatccctctccccagtcttctctccaataagttctgctcaacatctttcaaaattttctcccatactatcttctccaaccccaccatcttcttcccatcccaccgccaccatcttctccccacctccccctccaccatcctcttcttcccactgtccccttttgcaccatcttccccactcattccacccagatttttatccccactccctcaccccaccattattttccttctgggctaccttttcccagaccacttttttcccaactgtttgtccttaacccctcaccccactgtcttcctccccacaagccctctccctaaactcttctccccactgagtgctgcccaacatctcctccccattgtcttctccccaccttcatcttccccatttccatttcccaccctactctcttcttcttcttcaccattttttcttcatcttcttctttgccatttccttttcccaccccaccttcttcttccagactgccccctctccacctccactgtatttttcccactgtgttccacccaatatctttctctccccagaatcttttctccagaagcttctcttcagtgtcttctccccactccccccaccatcatctttcccactccctctccccacacaaccctctttctgacccttttctccctgaccacattctcccaacctccttctccccactccttcaccctacaatcttcttcccacactccctctccccagagtcttctccccactgtgttgtgtccaacatcgtctttccagagtttcctctctagcatgttctctttacatctccaccccaccatcttcttccagatcctctttctccctgaacctcttctccctgatcaccttctccccaccacctttttccacctgctcaccccaccatctcttccctacctcctcctcactctttctccccaatgttttatccccactttcactcctcaccttacttctccaactccctcttctccctattttcttcccccaccgtcttgtcttcttctcccactgtcttcttccccaaccatcttcttccccattccctttctccaccttcttctccaccccatccccaaccttcttcctatcccaccctctttttctgatcgtcctcttccccaccaccttcttcacaactgccttctccccaacttctcaccccaccatcttctcccccctcatacccacagttccactcccaaaagtcttctctccactgtgttttgcacatcttctccccagaatcgtctccccatttcctctccccaaaatcttccttcaaccctctctcaccaccattccatatttttgaaattgttaattgtgctgctataaacatgtgtatgcatctgtctttttaatgcttctttttaataacttcttttactcacagtggtgagatcactggataagaaggaagttctacttttagtttctttttttttttaaaaaaaaaaaacctccatcattcttcccaccatcttctgcccaaactccttcttcccaaagtcttctcccgatctgcccaaaatcatttccccaccatcttctccccacacttcttctccccatcttggaagagaagaagaaggaggaggaaaaggagtggggaaaggtggaggagaagaaggaaaagaggagaaagagaaaagaagggaaggagggtggaagggaaggagagggggaggaaaaggagggtggaggggaaggaggaaaaggagcataaaggggaaagaggaggtggagggggtgaagaagaaagaggagaagaagggtgaagggagaaggaaggtataggagaaggagggtataggggaaggagagtagagggaaatgtggatgaaggaaaaaagggtgagggggaaggaaggtagagggaaaagagggtggaggggaaaaagagtggaaagggaagaggctagaggaaaaaggggggaggagtgtggagaggaaggagggtgaaggggaaggagggtgtagaagaaggaaggtagaggggaaggagggtgggaggaaaggagggtggaagggaaggagtgtggaggggaaggagggtggaggggaaggagggtggaggggaaggagggtggaggggaaggagggtggagagaaggagggtggagggaaggggggtggaggggaaggagggtggaagggaagggtagtggatgggaaggagggtggataggaaggagggtagataggaaggagggtggagatgaaggagaagaaggaggatggagagaaaggtgggtggaggggaaggagggtggaggggaaggagggcagagaggaaggagggtggaggggaaggagggtgaaggagaaggagtgtggaagggaaggagtggaagatgggtagaggggaagaaggagaaggagggtggaggggaagaaggatggaggggaaagaggatgggagggaagggagaaagaaaggtagaggggaagaagggtgcaggggaaggagctggaggggaaggagggtggaagggaaggatggtggagagaaaggaggggaaggatagtggaggggaagaagggtggaggggaaagaggtggaggggaaggagggtggaagggaaggatggtggaggggaagcaggttggaggggaagaagaggctagaaaaatggaggaggtgaggggtgaatggggaagaaaaggttggagggtggaagggaagaagagggtggaggatgacaggtaatgggctagaacaagtggttgtattagtataaattcccaccagcagtgtaaaagccttctctattcaccacatctttgacactatttattgtttttgattttttaattatggccattgtagctggagtaaagggtatctcattgtgatgttaatttgcatttccctgataattagtgatgttgagcattttctatatgtttgttggctgttttcatgtattcttttgagaatggtttatttatttcctttgttcactttttgatgggattatttgtctttttcttgctgatctgtttgagtaccttgtagattctggatattagtcctttgtcaaaagcatagtttgcaaatattttctccccctctgtgggttgtccatttactctgctgattatttgttttgctgtgcagaagctttttggtttgattaggtcccatttatctatttttgtttatgttgcctttgcttttcggttcttggttataagccaatgtttaggagagattatctgatgttatcttctagaatttttatggttccacaccttaggtttaagtctttgatccatcttgagttgatttttgtataaggtgagagatgaggatccagttttattcttctacatgtggcttacctattatcgcagctccacttgttgaatagggcatcttttccccactttgtttttgtttgctttatggaagatcagttgtctgtaagtatttgactttatttctgggttctctattctgttccattggtctgtgtggctgtttttataccaatgccatgctgttttggtcactatagccttgtagtatagtttgaaatcaggtaatgtgatgcctccagatgtgttgtttttacttagtcttgctttggctatgagggctctttttgtgttccatatgaatttgtgtacattgattttgtatcctaaaacaacctcatccttcttctagtaatattgctccagatatctcattaaatttgatcattgcacaacatatgtatgccctgaaacataatatttaaccccataattgtgtacaatgattatgtgtcaattaaaaagaaaaagaaaggggcaggagtggtgatgagagaggaactgggccggggctgacgttttgctgcaggcaggggcagtgatacccttcaggctttaagcaagtgtgttgtcatctctgtaagtcgagccccatgtctcttctagtgacatgaaagaccaggaagtgcacttagcacctaggaacctgccagatagttcatgtgggtttgcatttgggggcacagtataaaggctgggtctttttaatgtctccacctccacccccacaaacaggatggcagagtttcattctcctgcaagacacaaatgaccctactttcctacttaacctcccccgggaaacagcaggaaaaagatcatgcccagtaagctgcttgaagaaatgggtaatgctcctatgctaatttcatgtttcaatcctttattgtattttctttaacaatcgaatttcgctttcaaaattaatgcattaattaaacactatatcctgttcccagcagcctaattatctttgccatgtaatctgttaaaagagctggattaaaatatttgattttaacacatgattttctaagacagttttctaagtgtccaatatttgctaattgaagaaaaaattactgctaattctggcctaaatattgccagtaataagcagccacatcaccccatctcctgctgcttccgccaccatttccacagaatccaacttccaccaacctgaggatctgaagagtttgttgggaaactcccccgcaccgacaaccccaagcctgattctagctatcaggcggatttatgccttgcattgtatagaggttaaagacatatgcaaattcaagtcttggtactgctactgacctctctgggctttaatgaccacaaggcattagtgtattttgtgaattaactcttatatacaccacttttatttacacacttagaacagcgcccagcacacagctagagctatggaagcatttgcgacgatcatcattgtcatcatcatcatcatcatcatcgtcatcatcatcatcatcatcgtcaacatcatcatcgccatcatcgtcgtcatcattatcatcatcatcattgcttctactacaatcaaaggctttttcaggagaggttctaatgggtcatttactctgtggtgtaaatttaagacactgggggaatctgcaataacgtcctagccttaacggtaaaacaaaagacattgcttccatgttaaaattatttcacagaaagacaaatatcgcatgttctcactcataagtggatgataaatgtgttcatgtggacatagagaatggaatgagagagaaggggactgggaagggtgccaggtgggaggggtaaggatgatgaaaaatcagttaatgggtacaatgtatgttattcaggtaacagataccctaaaagccctgacttgaccactatgaagtctatgcacataattacacatgtactccacaaataaaaataagtgaaaatttaatatctatatgttttaggctaaagggaggtgaaggccccacagggtgagttttcctgcctgaagaaaacttcccaggggagctctgtctgcctggaccccagcacgcagcaagcctggccagctttcccctacccacctccccagtagaggagtcacccagagcccatcctgcttcagcccaggcacccgcagagcaggcactcctgggggaaagtgagagtgagacaggctggagtctcatcaatttcacactcagcagatccagaaggagtttatttcagtatacgtgtgtactttgtgaaattgaagaggaaaatatctacatgcatgtgcacacacaccacacacaaatatatacaaatacacacacacatacacacacacaattttgatccagttctgagcaaatgcatctagaggaggaaaaatgtttgtgggctgaaaatagacaagggtacctcctattctcccaacagctcagagttgagcagtgttaacttaaaaatcacaagatgtataaattagaaaaggaggctttcttataaaagggtacagcctacaaggtggctgtccgcaggctgggaagcatagcctttggccaagaccagagacaggcactctgaaagagaaggggtttgggacaggagctctatgctgagcaggttggccaaacatacatattcaacagattgcaggagaatccatgaatattcatgaaggtggtcctgatatatgcatgtgactatatatgatgcatattcactttggggatgagacaacatttaactgtattagcccatccaaaggccttttcagaacacaaggcacatgactgtagaacttccaaaaaccagccagaactagtccatggtcagcagtctctgatcgggagaaagttactgaaatcagcctcttatctagtacaggctgcagttatggctggtgggacaggggtcagttagcctgcgtctgtgagctgggtaacttgtaactgttttaacattgcttatctccaggccagtgcttgctcagctgctggagttttgaaaagaaacacctgtgacagagcacagtttctcctttaagtgtgggagtgtggggcaggatcttaggtccaggttacaatttggtatctattgccacaaaagtccattctgccagtcttacgatctctattttaacatgaacgctggtcacttgctgtgtctgaaccagaaaggagaggggtataaagaggcatgtctgaccgcccatcctgtcatggcaggaactcaacttctctgggtccccttcaccacaaggcatgtctgtttagttgatgaggcttaggattttatttttagtttacagcagagagagtttttccaccctgggtactggcaaagtttgctccctccctcctcctggggtctgcagggggtggggaggggcagtgcagggggctccagccctcagctgcaggccaggcggacagggcaggacacagctgcctgattccagcccagcatcaaagcacccacatagcccagatcagagcagaaaaaaatgtaaaatgacagaaagttgcttttatgtgaatgcacccaagccatgttggatcactgtttagaatgatttggtatttcttttattgttttttttttttatttagtcagtgatttaattatgagaacagcaaatagtgttaaagcttcatgaggcgccaatagtccgggaggcctgaaagagtaaatacaatgatactctgtcatgaaatctactgagtgccttgcagccaccggctcatagcatttggctctgctcccagagaggcataaacaatgcaaaaacccataattactgtgtcagtcacaacatccctgcagaataccgagttccacccccggctgctggcttcctggcattggacaaggtgcacagccacaccgtcctctgctggagagaccccagcgactaggcagccatggacacccagcattcttaggactcctgcccaggcctccatctccccccacccagagatgacagcaagcacagcccagcctgccccatttcttgctattcacagacttccagggaactggggctgtgggcaggtcttccttcctcaacttcacccagggggctccaactgtaaaagaaaataaaacttaggaccctctgaatgtattatgccgaggaggaaggcaagccctggggaatgagtcatgtagcatatttgcagtttttcttcttagatgagagtttaactcttccttgttgttgttctgtaaatgactaatcatgggttattatagattaaatgattatagagcaaatgttatatattaaattatatagattaaatgattaccataaagtcttgtacccaactcagaccagatggtgtccaagacctcagcacggttacagccttaatgtggaaggttaaatatacgttttctgaaagaaaaagaccacctcgtctaatcagatcactatgactatgcagtaagcctctcatagaaagatgtttaaattctgttaaacttttttaggctttgtctgtatacgtgatgtcctgggtgggcctgtcctcaactttgcgcttgaataaactttctttaaactagattcagatccttttgattattttaggtcatcacgaccactgggttcctagatatccttctccctagagcagtgctgtccaattaaatataatgcaagccacatacgtagctttagattttctagtttaaaaaaattaactcaaaaaaattaattgcagtcatgtatcttatctatcccaatatgtccataatattagtatttcaatgtgtaagccatattaaaaaatatgaaacagatattttacattctttggcactaaacttttgaaatcaggtgtgtacttgccacagctcatcccagtctagccacatttcaggtgccaatagccacgtgcaggtaatggcaccatatagcccagggaaccaaaatggtctccctgagccacagcctgccctgggccctgtgagcctggaacagccccaccatcaccccactgtggctttggagataaaggcagggagggattccatcacagggagactgcacctccatctgcccctaggaggttctgccccaaacattttagtccccatgtacacattcccaaaggagcctggacagcctgcctagcagcccctgcctccagcaactgctgctgcagtggaggaagacactagctgccctctgccccctccctccctgccagtcaacagagaatctttgccagcccaacctgcccctccagtcccctacttccctgccccactccctccacccaagcgtttcttgaaatgctgctcagcctgtcctctgctcccctgtagatacctcacaaagaggccctgctgagcagttcagtttccagtggtgcaaataaataaagtggttggtgtttcagataaaagaggagagattcccagcctccccactcccaggggagcgctgaaatctcctgcactgctgcttctcactgggggatggcttacagaacagccccttctggaagacccccacccctcctgcctttaactccaaggaccctgaggtcacattccctcctcttgtctgctcaaatattctgattctcccttcaacttctgttcctttcctcctatattcaaggaaaaagtgtctttttttttctggttccaagcaaatcctacctcttgaagccctggtcctgtctttactcctctactcaggcctcagtcactcagtctctagtctcttgcaccttcagtctctgcttctccctagtctctttctgcagccccaaaacaagtctcttccctcagccatcaccaccagctcccactgcaacatacctcaacctcctggttatatctatttccttcacactcctttctccctaagcctttgcaacctgactttcttctccatccatcctaactctcagaggtcatcaggaccctggtcacacacattctcactgtctacctctcagagtcacctgtagcatgggccaacactttctcttcctgtcacctttgcacagcacgtgggcctgtaggtcttctccaggcagccgcagcacggtctttgcccctctgtgatagtacccaggctctggaaggggttgccacttgctaaggccatggggttcttgattttggaaaccatgacactcatccattcagttagtcgttcaatgagtattttttgaacaactgccacagtaggtgaccagcctgagtcagatactggggatccagcagtgaacaaaacagaaaggcctctgagctcatggagcttgtgttctacttggagagacatgatgtaggcaaaaaacaacaaattaaaaaattcaagataattgcagatagtggcaagtgctatgaagatatagaagcagagtgatatgatgagaaagagaggtttatggggggtcattttttaaatttaatttaattttattttttagagacagagtctcactctgtcacccaggctagagtgctgtggtgcaatcatagcttactgcaacctcgaactcctgggcttaagcgatctgcccacctcagcctctcaaggagctgaaactacaggcatgcaccaccatgcccggggagggcaatttataatagattgaccagccagggaaggcctagctcaggaggaaacacctaatctgaggcctgagtaaaataacggcttcagccaggctgacatgtgcggatggcagcgtcacagatgtccacgctgttcacaactggcatcctttctaatgggtcagtggtcacgactggctgcttagtctctatctcttctggtcccagttatgataaaataaacagtcagagcacaagttgcaaagacctcgcgacagccaggcatgggggtggggggcaggaatgtgacaagtgtggagggtcccataccttacctgcattccttacctgcctcagtaaggtgtttggattttactctcagggcctgggagggtgttgagcagatttcagcaggagagctacattctctgatttgcattttaacaggccactccagctgctgtggagtgtgtattttaggaagatgggagtgaaagcagagggtctggatgggaggctgtcattgtccgggttcctagaaacagacgctggtccagtataagtagtttgtttaggaagtgttgccggaagactggtaggggcaaagggaaatgagatctggaagggagggcagccagcccagggtgtccgcaagcaggttcccactgtcagcagctggagtttgatcccgctgggccctaaggaccgcagtggagaacacatgtctcagatctgtcttgccccagggctgagggcatttgagagttatcacaccagcccagcactcctggcctgatttgtgtgggcagagaggctctgacaaagagacacaggggctggcaggggcaagtcagggcatggggcagggccctgatagcatctgccacccagaggagagaccatgctggcccggaatggagtggcagaaacagtgattaaaagagaagtcagaggcctgtaatcccagcacgttgggagactaaggtaggaagattgcttgaggccaggagtttgagaccagcctgggcaacatagtgagaaccccatctctatcaaaataaaaataaaaataaaaataaaagtgagcaggttgtagaggcagaaacttgtagtcccagatactgaggaggctgaggtggaatgatcgcttgagcccagcagtttgaggctgcagagctatgattgattgcaccactgcactccagcctgggcaatatagtaaagccctctttctaaaacaaacaaaaaaatttaagaaacatgaggaatgaagttgtaataaaagctacaacgcagatgaaccttgaaaaaataacaatatttaagcacattttaaaaaactaataataccaaaaactatttaactgaacacgctaatgagtgaattgtatggtatgtgaattatatctcagtaaagctgtttttttaaaaccagagggaacagtaaagagaatcagaatacgagttaacccacaagactggctgatgaactggatgtcctgggtgagctgatgactgagagacttcaagacctgcagctgggcacagatgggggtgctctgccttgccaaccacttatgccaagctggttggaagctgccattggtcttggtttctccagcctaggaggtcacagggaactggccagggaagggctggagagcttgcagctttatgcagtcttaggcaaagcctgtttttgaatctcacgtccttggtttctcttcccaggcacactcttagcacagctcactgtagctcctcagcccactgtaacgtgccctattccagggagctgggcatctttgggtcacagtccttccttttcagccaatttttcgcgagtccacaaagagctgccactaggaagcaatcagatgctgcagttagagaggccggggaggaggacacacacacccaacctgggaacagcatgagtcatttccctctgtgcctgtggatggacgcccggccagacaaggcttttatctttaactgactctcagaaagttggattcattttgtttttaatttttatgggtacatagtaggtgtatatgcttatggggtatgtgagatattttgacacaagcatgaaatgtgtaataatcacatcagggtaaatggggtactcatcccctcaagcatttatcattgttttgtgttataaatattccaattatactcttttagttatttttaaatgtataataaataatcattgactgtagtcaccctgttgtgctatcagatactagatcttatgtattccttctaatgatattttcgtattcattaacatctccactttcccctctgctctcctccgcattacccttcccagcctctggtaaccattcttccattctctatccccatgagttcaattgttttaatttttaactccaacaagtaagtgacaatatataaagtttttctttctgtgcctggcttattttagttaacataatggcctccagttccattcatgttgttgcaaatgacaggatctcattattttttatggctgcatagtactccattgtgtataagtacattttctttatccattcatctgttgatggacacttaggttgcttccaaatcttggctattgtgaacagtgctgcaataaacatgggagtgcagacatctcttcaatagcctgatttccttcctttcaggtatatacccagcagtaggattgcttaatcatatggtagctcaattttcagttttttgagaaacctccaaactaatctccatagtggttgtactaatctacattcccaccaacagtgtacaaatgttccctcttctccacatcctcgccagcttttgttattgcctgcctttcggataaaagtcattttagctggagtgagatgatatttcaatgtagtttgaatttgcatttctctgatgatcagtgatgttgaacaccttttcatatacctgtgtgtcacttgtatatcttcttttgagaaatgtctattcagatcttatattgggttattaggattttttttttctatagagttgttagagctccttttatattctggttatttttcccttgtcaatgagtagtttgtaaatattttctcctattgtgtgggttgtctcttcactttgtttatttttttctgtgcagaagctttttaacttgatgtggtcccatttgtccatcttgctttagttgcctgtgcttctagggtattgctcaggtattagcccaggctaatgtcctggtgagtttcttcaatgttttcttttagtagtttcatagttttaggtcttagagttaagtctttaatccattttgatttgatttttgtatatggcaagagatggggtctagtttcatgtttctgcaaacagatatctggttttcccagcaacatttattgaagatactgtccttttagtaagtctgctatagttcattacagttggttaaatcaataaggctacatataatttaatcttcttttaaccagctgaacttgtaaagctatatgtgagccaagctaaaaacttctctggtcgcatgcccttcaattgtatctcatttaaccaataaaattttctccattgacttatttctttgacaaagattgctaatcagtttaaagaatggtgcaccaatttaatcacaggtctaggccatggcaatgctccagagagtaccaaatggtaaaactgtgatgggacagacggtgcgtaggtgacctagctagaaactagcccaaattaggtccagaggagatgctgaggacttctagttccagcatctccatttctcttataaggaatgttattccttataagaggaataacctcagcctctcggctgagagaggcttggtgatttgctcaaggtcacacagccagtaaatgtgatcagacggatgatctcttatttctcagtccctgtcttgttcctcacctcccactgacttttattaccaaaaaaatttttttccagttgaccacaggattacgaaaccttaatgaacttcagcaggatgagtaaaatgtgacaccggaaatactcacccacagtatggagtagctattccatgacaggcagggatcctctcactctaccactctgccagctaagcctgtgcatggaggtagtggggggtgtacaagttggccctctgtgtttgcatgttacactcatccagaagagcagacaagagaggattgaggacatgaatctgattgggatggaagccaagaaagagcaaaaaagaaactggctggtctaagagttaaactaccattcaacccagcaatttcattcctgggtatggatccaaaggaaaagaaattctacaagaaagacctatgcacccttatgttcattgcagcactgttcacaatagcagaaacatggagtcaacccaggtgctcaccaatgatggactggatgaagcaaatgtggaacatatacaccatggaatactatgcagccatagaaagaatgaaatcatgtcatgattccagcaacatgaatgcagctggaagtcattatcctaagtgaactcatgcagaagtggaaaaccaaatgcctcacgtattaagtggcagctgaacattgggtactcatggacataaagttgggaacaacagacactggggaatacaagaaggtgaagggtggggtaagggccgaaaaactacctattgggtactgtgctcactacctgggtgatgggttcaatcactctccaaacctcaacaccatgtaatatacctttgtaacaaaactgcacaggtaccccttgattgtaaggtaaaagtttaaaataattaaagacacccaaatagctaaatgaattcaaacaaatgtacatttgaataaaaacactcaatgtggcaaaatcctcacataattagagatacccttgtacaggtcccagtatctagtaaatgctcaaaaaatgaagggaaaaataaacaaaacaaacaaactggcgggcaaatgtgagcaggaagatggcctgagcctatgtctgcaggctgcctccacacggctgactccacagggctgcactcaggactgtgagccacctccgccaagttgggcttccgtacgcccctgagcagtggcagctgagcaacgctgtgcaggaagcaggctgacaatgtgcacaagttcaactcgcccaagcacgttcttcatttcagtgttttaaaacctcatgcattcctgccacctctcttcattatagacactgctgcacataatccgtgcagtgaggggtgagccactcggctggtctcccatctctgggccctcccccctccccattgccctggcaggcagactggatggcagaggagaggccttttgattgagactggaatgaatctgcactgttttcagaagtaggtggacacggggaagcctgcatatttctctaccacccagtgagaatttctcatccacctgcagaattgctaggcctcattcttttgtcatcacagctttctatttctagagacagggtctcacgctgtcacccagactggagtgcagcagcatgatcatagctcactgcagcctcaacttcgggggctcaagtgatcctcccacctcagctcccaagaaactggaactacaggcatgtgccaatttttattttttagagatggagtcttgctatgttgcccaggctgttctgaaactcctggcttcaaatgatcctccttccttggcctcccaaagtgctggaattacaagtgtgagcaaccaagcctggccttgtcatcatagcttaatgcaattgagagtgggtcagttctccaggctggttaacaccagcatctgtagtcaaggctgctaaaacaatttaatttgagggtccagggaggactgagagaagtcctggaaccagtgttgggagaaccaataggcagtgaccctaaacttgctgagcctcaaggcacagagcagagaacacagggaagggcaggagcccagccttcccccgacatcccccccaacctcagctctgcccactcttgaaggtacagctcatgcctcctcttccaggaaccctttcctgactatccagccacagggctgaccacttcttaaaattcctatgcactcagggctcaaaactcacagtcaaattaaatccagcaaatatgtatcagtttctggacactaacaacatggtatttgtctctagggtagctcatcccatgctggaggtggggactgacggagagcaaacctgcaaaatgcaccaaccagctccacgtgttgctggcacatcagagggtggaatggattgggaaggatccatagaggatggcctcccagatgctgtgatggtaaatgagaggcctcctggattccccttatagttgggttctaaagttgacacaaaaagcaaggccatggatggtcaagatgattcttgaaactctcttagaaagatgccatgctggagataaacacacttgctcatagtgactccattcaaccagccttccctccagcattagggtagacctgctcactcagttggcttgtactgcagggccatggtataaggaaaaccagtgtcttcaatgactgaagtcacaatcagtgatgtgagatgcttaggtctggaggttccgggaccaatctgagctaaaaagcggtgatagtgatttctgctctgtcctctctggggcagacacatgcagcatatcatgggcacaattgtcagtgctgtttaaattgtatcctctctctctcttaattgaacttttgtcactgacatgttgtgtgctgggcttctctgcctagcttcctatgtgctctacaggtgcatatctgtcccatccctcagttttatttatgcagaatctgctgcatctctggaagatttgtgagctgactgcaaacacaccaagagtaaggggagcagatgttttctctcagccccgaatcccactcagagtgcacacaagccatggcacagagcaggggcccagagcctgcttgctagaaggatcctctttctccttccccagagactgcacagaaagcaccccggccccttctggggatgtgtgccatactcatggtgcagctctgcagcctcctcctgaaagcacttcctccagaggtgagcaggagtgcctgtcccgggcgtgggaggtggctgggtgcatggcaggagtgcctgtcctgggcgtgggaggctgctgcgtgcaccacaggcgtgcctgtcccaggtgtgggaggctgctgggtgcacccctcctgcagcaccagggccgcttggtgcaatgcctgcaggtgctcaggagacttgcctgtctgggctccttcctgcctgctggatttcctgaagaaagggtctagggaataatgcagggcttggatagtcattgtaccattggccccctgctagggaacccagggatgagaaggggaggctgcaggatttaaggggaagtattctggacagattttcctagcttgcttttaaacaggtttgaatagttcaccctgagttggtgacatttcagcttccttcatctctcacattaggggcaaactaaaatataaagcaaaaaagtcattgaatcatcagggcctcctttttctcttctgtaaaatgggagcaataccactaatctcacaggatggttttgaggattgaacaaaataagttaaatgtgtggtgaataaaagagaaggaaatagtgtctttcacagcaacttgggtggtgctgggggccattatcctaagtaaagaaactcaagaacagaaaaccaaatactgcactttctcacttataagtgggagccaagctatgggtatgcaaagtcatgtacaggggtgtgatggacactggagactcagaagggggaaggttaggagggggaaagggataaaaagtcacctctggggtgcaatgtacactattgtggtgacgggtgcactaaaatgccacactccaccactatactattcatccgtgtagccaaaaccactggaacccccaaagctagtgaaatttagataaataaataaatcaacaaataattttacttagtacaaaatgtgtggcaagctgtaaagtctacaaatgctaagtgctggcagaaaaagctttgcctttcaggggagacaggaaggagagcaatcaggggcctccggaggccatgtgcgcagtcccaggagagtggacctgggggttggaggagcccaacccagcaggaagagctcggagcacctgctcctgcctgagcagcatccgttcctctcccgggggctttcctgtgcggcaccccctcatctgtttccagctcatgggtgtggggttggggggacattgtgagctgaccccacgcccagccctaggactttccaggcatgtaaggggtaagttctctttgtgatgaagccagctggtgacaggctcgagtaacaggtgatcaggagtcctcttcaccatggcacattttgaaaagccatggcatgcagggaggggccagataagccaaggcctttgctgtcaagaggacgaagcacagagaacttctttccatgaacttatctacagccgtctccaaactcgtctcaagcttactggaaggcacagatgcagggcagcccttgccgacaagagtacccactgcctctggcttctgtcttgctctcagcccagaaacagcagtaaacatccagggaaaggtgaactccgcatgttctcaggggattcacattggacctccagagtcaagacgcctctgacaaagggacgcagtgttctgaggctcttgtcttcctcagagaagaaagacagcctcttgttttagcagttgccaaaattccactggcatgccaagtggtggcaggtgaaaatttggacaaccacaaagcacttctgactgtgaaatgttctgccacagctgcaagacagagagactgtttcagagactgtaatgacccacaaaacagattgtctcattacctcctgggaacctggtccattccaggcaaaaacctcttccatttgcaactccagatgttggatctccagtgccactgttgccaatcacagtagttctgggtcttaatataacaggtgccagctgcattagatttttctctgctgcctctgctgggtttcattttcaacctgctacaaattagagggacttctagcaagtcatgttttataaccatttgtgggattggagtaaaatccagcatggtcacctcactgtttcatctgctgttgctttgtctttctgtctggaagagctggatcctttaagtaagggagtcttagaggccgtatcatcatgtttcaatgatttatacatttactggactcactccccttcagcccagtctaaacagatggtagggagaaaactgagcctcctgcaccaaactgttctgactcttggagctttctttgcagtcgcatttattgtgcattattcctgttgtcagggaggcaggtttgaaagctgcagctaattaagaagcccacacaaaaccacagacacacagccttcacttcagggtggcctagaagcacagccaccaactgaaccctgcacggtttgatgccatgccagagaaagtgaacccttggttacacgggattacccggcccatggaatatccacactcaaagctctatccaaagaggtaactcagaagtgaatgttctcaagcttttggctgagccaatctctaaataagtcagtctaggagaatgttatcattggaccaaccaaaccacacatacttggaccccatggaaatgctgatgctttcattgactgtcgcctttaagtcattttgcaccttggattctgtccaggccatgtttaggagactgtaaggttcattgttgcagcaaaagctctgaaggccaagtgtcctattccaactctagctgtgttttttactaactgtgaggctttaggtgcatctcttaacttccctaagctctggtttctgcatctgcaaaagtccctctctgaaagtgatggtgtatgtcaaagacatggagtcaacctaggtgtccatcagtggactggataaacaaaatgtggtacatctacaccatggaatactattcagccataaaggagagcaaggccacaaactttgcagcaacatggatgcagccggaggccattatcctaagcaaactgacacaggaaaagaaaaccaaataccacatgttcttacttataagtaggagctaaacactgggaacacatggacataaaggtgagaacaataaacactgggggctactatgagggggagggaggaggcaaaggtcgaaaactacctattgggtatgatgttcactacctgagtgatgggatcatttgtaccccaaacctcagcatcaggcaaattacccatgtaacaaacctgcacctataccctcaaatctaaaataaaagctgaaattataaaaaaagacataaaataaaaatgatggcacatatgcatctaccagataagtgggtatcaatagcttttgcctcctaagcctcaattttccctctcctagcagccatacctcagtttttttgggggggaaattatgcctctctactctcagttttctgggtaaaagtgaaggcagagggtgatcctgccagtaatttcagacttgaacacgacacttagacctggccaattggggtttctaccgacctggatgtgtggttggcacaggatgtatgcacaactcaaagggtctaatgagagagccccaagctctttcttccttattatgtagggttaggctcacaggaggtgctttatcagagggatggcggtccaggtcattcttaatctttcctgctgctgacatcgctgttccaacatggcctttggacattccatttcagatcctgtgctgatgaaacagacttgtgaatatggctcctgatccacaggatgcaacctgaaccacagaaaatgctgagttctccagaggctgtcttcgtgccctgcctgtttcccttaagtgttcaatgtgtgctgatggcttcctgctgtgagggcctgagactgtccctggagagcttcctaagaaacatcagggttctcactcagggcgggcaggaagcgctgaggagctgatgccttaagaacgaccttcagccaatgatgggaaggactgaaggttgagcgcagcagactccttccctcaggaggcacagctctgtggcctgggctccacagggtcctctggagttctgcctgagccccgctgtccacagcagtgattggctctttaataagcagtgtcttctctctcctccctctgcctcttcacccttctcaactgcgctttctgggttcatctcctgaataaacacttgttctaaaatctttgtctcagggttgtttctaagggaaaactcagcctaaggtaagtcctttcagactcaagataatgggtctatccctggattgaaacagaaggtagaggtaggatgtggtggctcaagcctggaatccaaggcacaggattgggagatcaagacagaaagatagttttaggccaggagtttgagaccagcctgggcagcatagctaaatgctgtctctgctaaaaataatttttagtagacaaattagttgggcatggtgttgcacacctgcagtcccagctactcaggaggctgaggcaggaggatcacgtgagccctggaggctgaagctgcactgagctatgatcacaccaactgcactccagcctgggtgacagagtgagactctgccaaaaagaaaaaagaaaaaaaaggaaagaaaaggaaatacgaggtggaagctagcctggtgcagtacagagggagggatacatctgatgtgtcatctcaatagagttgtttcacaaattgattccaggacccaaacatgaaaatctgtttttgaatagactgaaatttttttactgacatatgttgtactttaacatcacagaatcataccgctggaaaattagctcattctttgagttttaagctctttttctctagcagtgagttttcttccccaatgaaacattaataggaggaaatattgattgagcgctttccctgtaccgtatttgagcactttctgtactcattttttacttagttttctcaatattactgtgatgtagttttcattattttatacaaaagagaattaaaatctcacatagacactcctcgccatcatatgaaatggatagatgcaagagttcttttgtagatgtgactggtagccatagagtccacaatgtgaagggcattcttagacaggattgtgcattgggagactgcagggacatgagataatcctccccctgggagtagggacacagcagcacacagctttcctttgagattttagaacataccccttggtgagtcatctgcaactcctctctctctccctcactcagcctcaccttctcaccagcattccccaagacttgtttctaaagctcagcacagatatctatatagacacacaatggcatggccctgccactatacacatccagatgttacactcaccgtgaatttgtaattaatagcatagcccctcttttcaagggaaaaaagaagtattcaaggaatacttctccaaccattagagggatgtctttctcccctaataaccctctgttctttgcaatcttaaactgagtcttccatgcttactcttaccaaccaatgtggcaatgaatatggccaatcccaggcctccctgctgatgaaagtccacccaatcaccaactttatactgactgatatgtgcccagaaactcttctgaaggacacatcttcagttttgcacaggttgtgaagtgtacccaagtaaactgagggggtcttcaggtcagggtctagacatcaaggtcatgtgctgctgtcaacaccccaaactgcacttaggggctgtatatggaaccagtgaggactctgtggcaattgtgagagggtgcagcttgaagcaaggttcaggcccctgccgcagtcaccacaacgtgggcctctttgctgatgttcataaaagactcgtggttaagcactgttgctcaatcttgctgctagttatctactcagaaaagaaatcattttataaaaagacacctgcacttgtatgtttttttgcagcactattcacaatagcaaagtcatgaaaccaacccgagtgccctgcaatgattggctgaataaacaaaatgtggtaaatatacaccatggaatactacatagtcataaaaaattataaaatcctatcttttgcagcaagctaggtggagctggaggccattatccttagtgaactaactcagaaacagaaaaccaaatactgcgtggtctcacagaactaaacagagctccccacttagtgggagctaaacaatgggcacacatagacataaagacaaaaacaatagacacgggggacccaaaagttggggagggagggttgaaaaattacctattaggtacaatgttcactatttgggtgatcagttcactagaagcccaattcctaccattatataatatagacatgtaacaaacaagcacatatattcctgaatctagaataaaatatatatatatatgtttaaataaagggcttctgtagctgggcgtggtggctcataactacaatcccagcactttaggaggccgaggtgggtggagcactcgaggtcaggagttctagagcagcctgaccaacatggtgaaaccccatctacactaaaaatacaaaaattagccaggcatgttggcacatgcctgtaatcccagctacttgggaggctgaggcaggacaatcacttgaatctgggatgtggaggttgcaatgagccgagaccgtgccattacaatccagcctgggcaacaagagcaaaactttgtctcacaaaaaaaaaaaagaaaaaagaaaaagcctggggggtggcttttgcttagaagtgatagtcatcctcctgaaccagtgtctaggattgttaattttgctgttgaaaatcccgtaaaggaaatatgagcatgtcttcattattttagacaatatatactgaattctgtcaagtactattatatgtgccatggggaaccactcgtggagtttttgtcttttgtgttgctttttttttttttttgagacaggttagattgtggcttattgcagcctcaactttccaggctcaggtgattctcctgcctcagcctcccaagtagctgggactacaggcccatgccaccatgcccagctaatggctaatttttgtttttattttttgtagagatggagtctcaccatgtttcccaggctggtcgcaaacttctgggctcaacctatcctcctgccttggcctcccaaagtgctaggattacaggtgtgagccactgtgcccagcctcacatggagttcaaaagctaggagaagatggaaataaggtcaacaaaaaaatatattttacatagtaataaaagctctgaagaaaattgaacaggttaatgaggaatagggtagcacagtggacgggggatgtgaatttggatggggtgaccaggaacctccctctgaactggccattctggaggggagacctgaaggatgaggagccagccatgaaagctagagagaggccgggtgccatggctcaggcctggaatcctagcactttgagagtgccaagattggagaatcgcctgggcccaggatatcaagaccagcctgggcagcatagccagttcctatgtctacaaaaaaataacaaattaaaaaattagctgtatgtggtggtgcgtgactgtagtcccagctactggagaggctgaggcatcaggactgcttaagcccagaggctgaagctgcagtgaattatgattgcatcactgcatttcagcctggatgaaagagtgagactgggaagggaaggggaggggaggggagggaagggaagggaagggaaacaaagggaagggaagggaagggaaagcagggcagaagaaagaagaaaaagtgcagccaactgttctggggtggaatgagctgggcatattcaaaaatcagtgagaagactgctgtgcaggggatggggagagaggaatcccacatgtaggaaagtgcaaacacttaatgtttgacggctccccctgctccagagagtgctgaatccatggatccaggcctgttcatgaatcctccagaaccaagaacagcgcctataaccagttaccagctcctgtcaccttcccttccaggaggtctctctaacattggttgctgttaagtccaggctgtcactctctcccccctggacacttgccccacattctccacagttcttccagcctccagcctcatcctgcccaggccaccaaactcattttccagaagcacagtttagcataggccatgcctgttcagaaaactttcctggcctcctgccagctgcaggaccaagtccaggtgcctccacctggcccttggggcccagccccacagacccaccctgtccacatcctcttcccatgactttcccgtgcctgtgctcagccaatctgtgctcactgctcccatccctgagctcctcttccccagcttcagggccttggtccaagctgtagcctcctcctgaaatgatacttatgatggaaataataatgaaaatgtagatatcgccttgatattcacaaagccctttctcacatgttattttcttcatcttcacaactttctagacagcgtcttgcctcccctgtacaaatatagctcacccttccaggcctagctctagcggcacctcttccaaggagatcactcagatctctcctccctttgtaccatcttggtccatcatctgccctctaatggccatcatcatgttcagtcgtgaatgctgtcactagtcactcatgctggttccccccacactaggccatctctttgagggcaagaactgagtccagactctctccatggcacccgagacaagacagcagagggtcaacgaaagaacaaataatgatggttcaaatgtgtttctacctgaaagagtgaatgaatgcatgaagaaagtcccaatccttagtgtctccatacataggagacaaaaataatgcaaaaccttttctataacatgaaatcagcttaagtttcaacggacatttgtgctgtaaatagtgagaaaggggatcaagaaagaagtaaaagatccagtcactttaaaacagtgactggaacaatcccaagacaaaatccaagaaaggccaggctctctccctctgatacatccaaagcaggttcatagactgcatgtggaaatggcaatgtggttgctgtgagaggtgtgacgggagcccccaccccagcacccatggaacaccaacggcactcagctgctgcacatatatgtgtacttgagcttatacatatgggtctctaccctattgaggatttcagtggctttttagcccgaggacaaagttccctcccctcacatcatctctgcagggcccagcgcaccatctgtgagcagctgacaatatctgccctccacactgcctcaggagcttgccaaaagctactcagaatcagaagtgcagtattacagccagatgcactgaggaagtgtgcctccactcctgacattagcctctgtgtgctcacatcagcctgggatactgggggctccatgcccggggtagaaggaacgctatagatggccaactagtgttgcaccaaccaggatctaagcaggagttgcctcctcgattaggagtctggaggaaaagccaatcatgtttctggatcatactctccagttgcagctggagttattgagacttagtggaatttattttatttctttgacaaacactgccatattgcataccaaatactgtttttaacacttgataggtattaattcattaaattatcataacaaccctatgggataggtactattagtatcattttacatatggggaaatgagtcctgcaaatttccgtaacttacccatggtcatacagctcgtaggtggcagaccctggatttgaacccaggaagtctgtgttcttaacatcatatgatactgtctgtgtaagttaagggcaaaacatttgggtgcaagacctaacacccaaaagtttactgtctctcctcctctgccgcctccaaaagcctcagactaagcaagaccatcttcactgttggtttggaacattctgaagctcatcagaacactaagaaactgtgttatagtgaatcagcacagaggccacataatgtagcaccatttagctttggagcaggctgctttcccatggacctttctgagtccatgtctccttgttagtacaagagagatatctacagtatcccacagaggtgtttatggaatttcactgaaataacacatgtgaagcacacagggcaaggtcaaggatctagtaaattctctagtaaaacatttgggtgcaagacctaagacacaaaagtctctgtgctgaactaaatgctcttagctgatgtggttgcctgcatcttacaaacacaggttcttaacctggtagtccatgaaccttactatgcagaagaataatgaggaaagtttaataaatacagactcctcagtcccactatgcaaaattctgattcattagctttcaaaggagcccaggaattcatgagggatcccaatacaagagttctcagattctgaggcatccatgactgcaaagaacatcacaaacaactgcattcaattctctgaaattataagaaatatccattgttgaagtaattgatgacctttggcctccttataatgaacacaaatggtaatgggagttggtgacagagtgaatgtggtggccctgccaactgtccattctgctctctctgtaaggacagacacttcccagacatcctctgccttgtaaggagctgggttatctgtaataagaactgatatttattgagtgcctaccaggggaaagccacccttccaatgctttctatacgttttgtacccagttctctgactaaaattactatcttattttatagatgagagaaatgaggctttaagggttgccaaagtcacctaataaagttagaatttctgctctgtcaccaaacacctattcaaagcctaatgccttccattactattccactaggaattaaaattggtgcataaggcacgttatgtttattgcagtactattcacaatagcaaagacttggaaccaacccaaatgtccatcaatgatagactggattaagaaaatgtggcacatatacaccatggaattctatgcagccataaaaaaggatgagttcatgtcctttgtagggacatggatgaagttggaaaccatcattctcagcaaactatcgcaaggacaaaaaaccaaacaccacatgttctcactcataggtgggaattgaacaatgagaacacatggacacaggaaggggaacatcacacactggggcctgttgtggggtggggggaggggggagggatagcattaggagatatacctaatgtaaataacaagttaatgggtgcactacaccaacatggcacatatatacatatgtaacaaacctgcacattgtgcacatgtaccctagaacttaaagtacaataaatataaataaataagcaaaaataaaaataaagtcattcagagtgataaataaataaataaatactggtgcatgaggatccaaaatttctagccatgctatatatctatgagacatgaccttcaaatgacctgatatggactgttgacataaatatcagttatagtctcaaaggcctcataataacttaggtttttgcataaatgaaggaacatgacatataataaagggtgtatatacagagtctattaatgtgtttagtttttaacaaatatatataagagtagataacaaatgaatgttgtctttcaagaatgccaccttgtaaatctgtgcacttttttccagcgatatggcctttgtgcataatattcttggacctcttcttttaacatagcttccagacctgctttttaacctcacgaagaaaccaaaacgttattttagagttgatttatctgttagattaaacattgtattatccagtttgaatgctctttgaacacattttgaatacttcccaatattatcccctctcaaaagatgcatatttatctccctgaggaagagtcaaaaaaaatgcttgtagacaatcatggtacttcccaaattcaatgcaaaaatttttgtgaacaaagatcatatgctggctggaaaactctggactacacattacacaaaacccaacccatgtgacttaaacagtaaaagaaatactgtcttatgtggcaagagaatggagtagggaaattgaggcctttggatgcacagaagtgttatcaaggacaattttggatattaagttcctggggagtttctattaaaatcagccaaattactttatggtcacagtacaaagaagtctcagtaatcatagaaatgaaagacactaattcagtcagaattaaaaagttataaagaatagaaactaactctggccaatttaggtaggaaaataaaaatctactggaagaacatggcggagctcccaaaaatgaaagctgaaaatccaggatcaaaaacggacaagcaccggagtagtccaacatttctgcagaggaatctgattggctgagcttctactcgaagcctgctcattggccaggggagggctgtgcaccctgattaatagccccaccaaaatggtcctcaagggcgaccaaatgattcctcgtaaggaagatgtcatatcgcggcagagagggacttggaggccaggaggccccacacaacaaatactcagtacaagcctcatcaaggcagatcttgcagacactgacttagcagatctaatcttggggcttgcaaagatgacaatgtcagcgctgactgtcaatcttcaggaaaccttgtgtgatggctgctgtcagcacccaagtcactcccccattcccctcgcaaagccagtgcatctacaccatcactcacagccggccacttctttggagagcttttcttgttcagtaggattcaccttacccagaaattcctgagcagctatcctctgtccctgggtgtgtttatctgcattatgtggaaaaacagaagcaaaaagacattttaaacatttgctcccaatgaagaagaaaatagcctatcattttatttaacaataaatgaagtaaaaaaaaatatttacaaccccatagagatgtttttgcattctaaattacatgaaagaggccaaaagctaacattttgacctatttgtccagcactaagtggagtaatcaggtaaccaccacttcaggagcctgcccagaaggtggtcgcacagaactaatcacataaccacagcagcctgtgtacatctcaccccaactctgaccatttgaataagatcagaagaaagtaattataggattcactttaatgtcaagcaacaaagagaactatataaacttggaaaatcgaccttcaagatatagtcatttttatttttaaaaaaagcttaagaaaagacacaaataattggctcatttttatgagattgaacttcaaggacagacattttttggaagtaaaagtcgtctagcagcattacctggtgcctgacccatagcatcccgaaagtgccaagcatgttggcacacactgggagagcctcgtttctagttccccaagaaaccaacagggtccccacttccactctctctcttcagggtaaaaatgtaaccactttggcatcaaaaaaaattctgaattatccacttggctcattgaagatattaattttctggaggaaaaataattcccaacacttactacaatgataaaggagactgttgtttcagctggaatggattccgtaaaagcttgatgtttctgacttggctaatggagtgagagggcacgggttctgtctgcgggtaacgcaaatcagtgccgccaccatcattcagtgggtgtcagagctggccagtgcagtccccgaaggctgcttgccaatgctgggaataaatgatttcccctctttatttgctatgtcaaggaatgataatggagcacattccatgaccatttgtcacggaagcgcagtcccctccatggggaatgtgtgggagtagcaaggacctagtgttttcaattaatcagggccaggattactcacgcaggaaatgaaagagaaaatttaatacttggaaatcgggtgaaagcagcaaccaagtctaattaaaatacactttctgcttcgaatttacatggcaggatccattttatgagtcacctttattcttgttgcatttctcttgcccctggaaactgccttaggcaaaagcacccaggagtttacacctgtgcaggtggtttctttccaatgacctcacgtgaaggcaagactggtcaaagcagatgggttgtgtggccatgttcttcctcctgggttttggcgtggccttgaattattcctccttgccctagactgtgcccaatggtcatgtatgtcgagcacagctccttattcccaattgcagcacctagaattctgctattggcttcaaggtgcaagcccgacaaagccctttggctggcgcacagctctgtgtgtaattaatgggtgatttgtagcaggcttgtgcctcgaatgcattgtttctctcattttcctttctggtgggggttgaagcagccccaggggactgcagcactgtcatgccacagcaaagaggctcctaccaaaaggcaaactaatatacactgtgtagtcctgagcaaactaagcacagacaggatttgttgtggctaattagttttatcacttcacaaaaacctaggttcctagtttccagagaaataattacaattgcaaatgaagaggcaccactgaagaagaaggtcttcagcacaaaagtaaccacagacccccacagcatctcccctgcagtttgagccctgccagggatcagctctaggggtttggaagccctgttgtctccctaggtgtggatgacacacacacatccactagcatctgtttctctgttagttcacaaaagatgtgttcaggggtcagatctttacacacacctgcacccgataacatgatgtatcctggcagattcgcgaaagactcacaatgccatgagtatccatgaatcagtgcaaatggaagacctcagctttgagaaggccacaggaatttcagtcagtcacaaaccaaggctggggtcagggtcatttccagtgggaccaatgaaggtcctgtacttaaggggtgaagaaagacaaacaagaaggaaagaagaggctccctttgagttgctgagtaaaatcagaaattaaaaaatactctgactgtaggtacatggagtacataaagttgaataactagtttaaaatgagctttacttttcaactgatggtcttaatatcttttagactcaaccatgactgtgaagcgaaggaagaaaggagtgaatagtacagaatctgtcgatacatggatatagatccagatctatgcatagatgtctatatatctaaatgtatgtagatatatccatttccatccctatatatctgtgtgaaaccacttctcaattaaaactactcttgctgctgccagacacatctcccttaatgacacctgcattggagaatgtataggcactgtcgaatgctcaaatgtgagctcattaccacattgggttctagtttaaaatgagtcattgtcactatttctctgcaagtcttaagagtagctccttttttgttcgttctgacttagccccaacccagtttcacctctggttttaagtgataatattaaacccttggcccatgcctttgctcctgcgaagactcacatgctaaagactgcagttctcacaacccagcagaaaggggagtctaggcctgccctgactgaatccaggaacaactggctgggtggagaagatcagccaggggcctgcaagtctccatgcctgatagaaagagctgcatagaccaggctctgccctccatacagaaaatgcttcattatttatctggatgtagaaaggtgggaaatagagatgttggcattcagcatccccacatatgggaaaatgccacgaccttgcatgtgaccttcaccttgtcacctgtcctccccaggcaaaaagcaactatcttattgccctttttgtgattagaagcacctcttccagcacaagattgcataggctgcctgtgcccatcaccaaaagtctcagacctaactatttcccaaagcaaaagactcatggcccttccctgtcccctgctgctgagctcctaggcctagtcccccgtggctgctgtgtcctaacgcctttggaaccattgtctccttggcctgtttgctccacccagagagagggtcagggtggtgacctccccaggatgtgtctgcagggtgcagactctcagggctgagctctgggattcatccccaacctctaccaaatcctgcctgctcctagagcagtggagaggcagagtggatgagctgtaccagaatttgcccttggcctgtatctcagaaaactccccatgaaataacacattttagagggaagaagaaagaccatagacttagagataggagattaaatctgactatggtaaaaaatgtttgaaaaattcgttatctctgtttgttcacaacactcactccagttacacccgtcaccccagagcagcagacttttgccttcttaacttgtcagaaccagtgcccagttctcctggggcgttttagatgctgatctcaagctcgccaggtggtgtgagtgggcagccaggtctctcatccacatgagtgatctcagcatctgttctgcctgtgccatgaagctccgcaggggcccttccaaccctgggaatgtgttgccaacaagatcccttctgtccctgtcaggcagaggtggcagagcactccttggcagtaagctttgtacccgaaccatttcttttttcacagtctttagataaggcagtttgagttcatttcaatagctggtacttcccgggttctgccaactgcctgtgtgctgtgaggagaggagagagcttttgtgaaattaagatgaatttcctccatggtttcacctttgtttacacattaataatacactccccacacctgaccgcacgggctgcattgcagccttcactactgctggcagctgtgccactgtcccctccatccacagccacgtctcacgtcttgcctttgcaggatgcccccaacttcccccaagcactgcctccacatgctgtcccttagaaagcggcttcctgagggctggtgtttcccagaagcctctctctctggctttgcaatttccctcttcctgcaagcaggtttcatctctcagactgagatgcatggcagccctcgccagcctggagcccttcccagggtcacttcactcacctggaccccttctagagagccccgtggtaactggttatctccacacattcacctccgggggtggggcctgcgtcttggaacacgctgagcgtatctagtaatgacaagggagagtggaaccatgggggatgtaggtggaaccatgacttctgagatattatagctattacatacacacaaacatgcatgaccatgcacatgcaacccccccacacacacagaaacacacacaccacagaaacacacgcacagagaaagacacacacacaccacagaaacacacacaccacagaaacgcacgcagatcccactgactagttgggaaatgttggtttttttcctttcttttttttttttttttagagggagtctcactctgttgcccaggctggagtgcagtggcgcgatctctgttcactgtaacctccgcctcctggggtcaagtgattctcctccctcagcctcccgagtagctggcattacaggcatcagccaccatgcctggctatttttttttatattttagtagagatggggtttcaccatgttggccaggctggtctcatactcctgacctgaagtgatctgcccacctcagcctcccaaagtgctgggattacaggcatgagccaccataacaggccaggaaatgttgcttttgtgataagaatttggcattgctcggctctgcctggtctctctataagagatgtatgtctacactcaggaatcaacctggtgctcatttttagccaggtaggttaaaaaaatagtagaccttccccatgcatatttttatgtcttcattgatctacaatgattgcacatatttctggggaacatgtgcgattttgataatgcttcctgtgtgtgtttgtattgtttcactcatgtgccttctagggcaccccttttccaaccattcacaatctggcagctcttctattatttggttaatgtaaagaaaaataatagtaacactacattgacattttgaaaatagaaaaatgagtggttggctttttgctctagaactctgcttcgaggggctgtgtaagcaaacaggatggtctccccagatcataggaatttagtcaacgtgagccctcagcctggcgcacagcctcctgccctgcagcctgtttctcttaagctctgtgtggaatgtggtcatctccttggttaaaaccagctcctgaccgagcctggtaatttatagtgagctttcctcatgaccatgctgaagtgtcaatcccaggaggagccacagcttcatcaccataacacgcgacccatgtgctggcagggactcactgcatctgcaccactgggacccctcctctccatgcaatggcgcaccctatccccctccatcacctcataaaaccctcccttccctttcccacactgctttggagaatatgcccgtgtcctccttacatgtgccaagtaataaaactcctgttaatcaacacctgccttctctgccttctcgtggagagtcgcttgtctctcaccaggtagacagattctggttatttttgggaaacagctggcccatatccagatcccccagagaagaggagctgagaacatttctgttcagggctcactgggccctctcctcacctccaggactaggcaatgaccatctgggtgctagaaggaagtgcttctacaaacttgctccagccagataaaagagaacaagcccttcatttgctcacttcctttgcaagcagagtgttgctctgcagtgtgctcctgagaggaaaaaactgccctgttggttcaggtcagtcaagccaagctcagtcacagaataagcaggcgcagtgggggcagaaggtagggagggcatggggaatgtggtaccactggggcggagagcaaagcaatggggagtcagtctcccacatgtgtcttctatcagtttatttattcactcaacagacatttattgaggaccaaccatgtgcaggactgatctgagtcctggggtagaggcgtaagtaagacagatgaggtgcctggtcttaaggggtttgtattcaagtgggagccagggaacaagagacatacaataaagatgtaagtaactaagttattttcagataaccactagtcctgggaagataattaaaaggcagtgggagggagggtaataatgttttagaacccaactggggagtactagcttggtgcaataaaaccagatacccacaaggaggtttttcagcaatagaaagaaaagcttttattgcagttgccaagcaaagacgaccaggcagctattgctcagatcctgaccttcccaatggcttgcaggaaaggatttttaaaggcaggggtaaattacaggaaaacagaagccacaggcaaaatcatcaatcaatacctggaggttacacattggtttagacctaaaagggtgtgatatcttgaagtggggacttacaggttataagcaaattcaaaaactttgcaatttgcaattggtgataaaagagcagctttatttaaaaatctggggtaagtagaaaaaatgtcctttttttgagatagtgtctcactctgtcatccaggctggagtgcagtggcatgaccatagctcactgcagcctcctgcctcagcctcttgagcagctgggactacaggcgtgcaccccagtgcctaaccaattttttaatgtttttttttaaatagtgagatggaatgtcactatgttgcccagctgatctcaagctcctggcctcaaacaatcatcccaccttggcctcccaaagtgctagaattacaggcatagctaccttaccaggcaggaaaagaatgtcaactggctagggtgagtgactttctccaagacccccaggaagaaatttataacaaaagatgatggttaaagttcagtcttcacttcccacttacctgaggtctgcatattggctgatcccttcagtgtgggtccccagtgggggtctgagtttctgaaagacaactcagaagtacaggttaagatgttctccttggattctttaggaaaaacaaacatccctaggactctaatttcctcaggtgtcctttaggctactattgccttcttttttaataagttacttattgacttctggagctagctaggtgcctggaacttcccttgaaggcaatcatgattctccttgatttccatgtttggggtctgcaggcccctaataaagggggctcctgctccatctcaatagggaaagagaaactagatcaggtcctcagggaagaccttggcattgagacctgaatgagaggagagacccaggtaagtgaagtaagaacattccaggaagaaacaaaagcaaggataaaatccttgagttgaatgaatacacatttctcaaaataagacacacagaaagccaccagacagatgaaaaaatgctcaacatcactaatcagggaaatacaaattagaaccacaatgaggcaccactttatcctagtcagaacggctattttttaaaagtcaaaaagcaatagatgttggtgtggatgtagtgaaaatggaacgcttatacgcagctggtgggattgtaaattagcacaacctctgtggaaaaagatgtggatatttgtcaaagaactaaaagtagatctaccattctacccagaaattccactactgggtatctacctcccaaaaacagtcactaaatcaaaaaaacacttgcatgcatatgtttattacagcacaattcacaattgcaaagacatagaatcaacctaagtgcccatcaactgataggccaacacacaatcatgaaatactactcagccataaaaaggaacaaaataatgtcttttgcaacaacttagatggagctggaggccattatgctaagtgaagtaagtcaggaatggaaaaccaaatattgaacattctcacttataagtgggagctaagctatgggtacgcaaagacatacagagtaatataatgaagtgtggagattcaaaagcaggagggtgggaggaaggtgagagaaaataaactacttattgagtacaatgtacactacttaggtgacgggcgcactaaaatctccgtcttcaccactgtacaattcatctgtgtaatcaaaaacaacttgtacccccaaagccattgaaattttacaaaatagaaataaaaaatttaaaagatctttaagtcaagaatatttatgaggataaatacttttgcccaaacccattgaacccaaatgccaccttattcaggaggtctgttggggccattgcacaccccttcctcagagcccttgagccaggagctgctgggtctggctgtctccttcacctcctttaggaggtgactacatcttattcagctctgcctcttccaggccaccaggttcaattgataccagctgttcaacagagactgagtgaatgggccaatgacaatatcggactggagtgacatgtctgtaccgaattgagaattatgacaattttaacattgcagcattctcccacttggagtttaatttgaggttgtattttttcttagtaatcaactgtgaggtaaaaatcaactgtttttggagagttctctgcactttaggggacaataatacagacagctgtatgtcgtagcttacggcagtgttacctcagtctcattgacataaactgatgggctgtctgatgctatgcagatgtggcttcaacatggctagacaggttcatcccagctccaaaaggaaaggagcagataagcatcaggaaggcagcagagtacagaacctctgaaagttcactcctccataaaagccataaaaaaaactggcaaaaatggccagaaacaactttttcagaactctgaaaattcaccaactgcttgcaacaccccagggagtgtttatgtaagaaaagcagctgaatcccagtaagaaccgagggctttgtagcattttgacttgccctagtctcatcctcttgctccagctcagcagcagccttggaaatcacctgcactccctgtactgaaagggatagaatagatctcattcccaaagagagtcattatttgacctgtctagtgcttccctgaaagaccttgtctttattagtggcccagtactaaaagccttgggggagggaggagcatttgcctgtagcatttactagtgtttcaacgggtacagctgcccgaggtaatggatagcatttggggcaaacaatagactaatgaaaagcttaaaggaaaagctgaggaatgagatgtccataaggaccctgaaaagctttgtcacattcctgggaatctataagaccctgagaatctgtccagtagggctttgcacatgtccaggaaccggagaaggccctaagcactcaccactgactgaagttgaggccctgcaggagcgggaaggaaagttgagacagagttgccaatttcctggcagagtgctgaccatgtgccccaacagacgcagaaaacccatctgcaaagactgagagatatttcattccaggcatttaaagaaacctctgtccagttattagctggccactaagctaaataagtagagactttgttaccaaaaaggggtcccgatccagaccccaagacagggttcttagatctcacacaagaaacaatttggggtgagttcataaagtgaaagcaggtttattagagaaagtgaaggaataaaaaatggccactctaaaggcagagagccgcttcagctgctaatgatacttattgttacttcttgattatgtgctaaccaaggggtggatttttcatgagctttccaggaaacgagtgggaaactccctgaactgaggattctttccctttttagaccatatagggtaacttcttaacatggcaatggcatttgtaaactgtcatggcaatggtgggagtgtcttttagcatgctaaaatattataatgagcatataataagccatgaggatgactagaggtcaattccatcaccatcttttggcgggttttagccagcttctttactacaacctgttttatcagcaagtttttgttttgttttgttttgtttttttgagacagtcttgctctgtcacccaggctggagtgcagcggcatgatctcggctcactacaacctccgcctcctgggttcaagcaattctctgcctcagcctcccaagtagtttggattacaggcacctgccaccatgcccagctactttttttttgttttgtatttttagtagagatagattttcaccatcttggccaggctggtcttgaactcctcacctcgtgatccacccacctcggcctcccaaagtgctgggattacgggtgtgagccactgtgtcccacctttatcgcaaggtttttatgacctgtatcttgtgccaacctcctatctcatcctctgacttagaactcctaacctcctaagaatgcagcccaataggtctcagccttattttacccagcctctattgaaaatggagttgctctggttcaaatgcctctgacagcttcagtggccactaggaacctattttgataagtaaaggtaaagaggtaaagaggttaagctgcttttcaagaaacagcaggctgtgccaacaatgctggttttagagctgtaggaacgcaaaagttacacccaaacagaaggaaatgttgacagtgtctgtagggtgcagtgtgggccacagaggaaggttggtctccaggagaatgggactcgaggttgaaaatgggactcaccttggcttacaggtttgcactagcagccgtgtgtatccactccatcactcgtcctctctgcaggatacaaggctttccaatgcaaaatggcacagtgttatgcagagtattaagtgacttgataagcttctcatcaggggatggaatttcctccattcctcacagcaaccagttcccaaggtttattgagggagcgtcttgctaattgtgtggctgttatgccggctttcccagatgaacatttttttttagcatctctcactccctagaaatcccactctgcctcagggatgtaaactaaaactaaaattctaagctccccaaccatctgaatggacccttcctcttggccaagagcattcattccagagtttacctgaaaaacgagttcaggccatgatgaggaggcaagggccggatacccttcaccatacatacgctccccctattggaattcaggcacaactgaccagcatcaacattaaaacagagatcttaagactttttgtagcaataagacaccaaattccagcctgaatgtagtgtagcatcacatgaaaggtatcaggccctgaaagaaatcaaaatattttaccctaaaatagatttctttacacattttaaaatggccctgcaaagctgtctcctgtgggaaaaatttacattctgtagcgaatccccttttccttccagatcttttctctgatccaggagagaattaactaagagtctggcactttttaaaagtcagataagaaacattcacaatctattctttctgaagtctgcaacctggaggcttcatctgcacaataagaatcttggtctccacagccccttatctgaacttgggcactcccttctgttgattctagatcttaactctttcaaccaattgccaatagaaacatctctgaattcacctataacctcgaagcctccccaaccccactgccttcaagttgtcccacctttctgggatgaactaatgtacatcttacagctattgattgatgtcttatgtctccctaaaatgtattaaaccaagctgtagcctgaccaccttgggcacatgtcgtcaggatgtcccgaggctgtgccaaggttattttaaccttggcaaaataaacctctaaattgattgagacttgcctcagataccttttggtttacaagggtgaggtgagtcactgggcagttttattgagactgagaatttggtggttcttggggttccaaaatccataaagactttttttagacctatgtctacagaaatagccaccctcttctaggttttgggtgaaagcagcccttcctggtggaaaagaatttcagcagtagcaaattgtttcttaacatggtaaaaaaaaaaaaaaaaaaaaaaaaaaaaaaaaaaaaagtctgtctcaggaagacacaatgtcattatttccaacaccatcctcaacagggacctagcaaaattatacgggcaacagtgccatcaagtggccaagcaggaaaataaccaatacctgaaaaagcgttttttccaagagtgaaattctggtggaagcgcttggaggagaatcatctgcattcccctggttcccctctttgtcctgggaggcacagacaagctccacattttcaactcaggactttctcaggtttttaaccttttcccaggaggcagtgcgcagcctcaggtcagggctgcctgacttgtcctctatgtgcagctccccttcctcagcccctctgataggcggcgtcctcttcacccgggtactggctgagaggtcacctcctctgaaaactctactcactgcatctaaaggagccactgcactccacacatcactctctacaagacacaagtttcatttttcttcatagcccttttcgcattgaaaatactttctttattcatctatttacctgcatatttcctgcctttcccacaccctcacgccctatgttgaaatttgatgagagtagagtcttacctgccttcctcactgccatgtcccaccattgggaacagtggccggagtagagcctccaatgcaacacgtgcgcttgcatgaatggataaacgggaggaaggaaagaggagagacgcaaaggccagtgttttaccaggaggcccaagtgacattgtctccattagcaacttcgggaccaacatcttacttcccttttttatttttaagattcagtgacttcaaatgcaaagggagttcatattatcaactcttatttagagtgaaccgagaatcagttaatctggctttaaatatccctcaaaggtgcagaattactccaggtattgcacgcagactgtaccttcctttaaaatccctctgtcctcataaagctgctatggacccaggaaatctctaagtgagtcttccctgtgtaactgaggagcacttgtgttaaaatacagaggatctccagcaacagaaaaagagtgaacctttgcctacggaacatgacaatttcctggaatcaaaggcctctctgcagtagctgatcatgttttacatctgtgggttgatcttgaagacgtgggcttatcaatatatcttgtcaacagtgggcattcatttaaataaaatcaaaaactgcaggcaaagttgccagaactggcaatttataggggcattttcactccaggagaactaaaaataagctactgttgagtttggattgcatttttatccacatataaatagctttggtaggtcacagtcgaggcaacattgctaaggaactctgcagtgtctcctcaaattgtcaggccactatcttaaaagacaggcagctagtctatagcaattgtgtggaaaccctccagcttttacttagatccccagctgctgcttcagataattagatgggaaaacttgccctctgagacaggtaaggatgatggagttttccggcagcgaattgcatggcaaatctgggcaagagctcccttccaaagtatctggtaactgagaggaaactcatttagaatttctgtcatgcagagttttcaaaaaagacttggggaaagccgtgcaaacctgcaaagatgatatttgtatctccaggctggaaaagtacccttttatctagtgatggccatgctggcttctctgtaagcactcacgaattgcttttcgattttcatccagaattataacatctgcgtaccgtgccccaccaacccaagtaaatatgaactgtgaatacatcccaccttcatatcacagttcagccgttcttagcattcattcttttactcgttaaacacttgctaagcccttactaatgcttccctcccactgtgcctgggcgggaggcacgctgagatgatgccctgccctccaggtctgaaggaggtgtggcataaggaagagtataactgaaaaagaagattcaaagcacagcaagtaagagcttcaccaactacttgcttcgtgcacttggccagtgacttaaactccctgagcttcagtttcctcacttctacagtagaggtgatggcagaacctgccacttagagatgctacaatctatgtaaattcttcaggatctagccacactattgtaagcagttagggaaaccaaatattttaccccaaaatatatttttgaaataatttgagatggctgttcagagatctggcaaacagaagtctccctgcaaagctgtcttctgtggggggagatttgcatctgtagggaagctgcactgatactgcgagtttttctctgaggcctccccttgtccttgtctggatctaggaaagattcactgagatcatgacaccttttaaggtctaaaaaagacatctaccacctaccctctctgagggcagccacctgtgaggttttagctacttaacaagcctacctatgctagccaggcctcatcttctccccctcccatcacctgttttaccaccataatttgttttgccgcaatccaagccccaattatttttatttaatttcaattttcattttagattcaggggatgtagcatgattgaacccatcacccaggtagtgagcatagttcccaatatacagtgtttcaacccttgccccccttcccttcccttcccttgtaacgtccccagtgtctgtcgttcccatctttatgtcaatgagtgcctgatgttcagctcccacttataagtgagaatatgcagtatttggttttctgttcctgcattaataggcttaggataatggcctccagctgcatccatgttgctgcaaagaacatgactttcgtcttttttatggctgtgtagtattctacggtatatatgtacaacatgtaaatccacaaatgtagatttctttatccaatccacagttgatggcaagtcccatttttttctgtagcctcaagatggcatgtaagcttctgaacccctttgggaggtaggagtccttactctgtgtttttctccctgtgtgcacattaacacatttatatgccttttctccaattagtctgacttttgtgggttgatttttttctttgcaaaccttccgatatagctgtgtccccaactaaatctcatcttgaattcccaggtgttgtgggagggacccggtgggaggtaaatgaatcatgggggcaagtctttcctgtgctgtcttcatgatagtgaataagtctcatgagatctgatggttttaaaaatgagagtttttttgtgcaagctctctctttgcctgctgccatccacgtaagacgttacttgctcctccttgccttccaccatgattgtgaggcttccccagccatgtggaactgtaagtctaattaaacctctttcttttgtaaatttcccagtctcaagtgtgcctttatcagcagcatgaaaacagactaatgagcattagacagactaatgttcattagaacagtaaataggcaccagtgcagtggagcactgctgagaagatacccgaaaatgtggaagtgactttggaactgggtaacaggcagaggttataacagtttggaggattcagaagacaggaagatgtgggaaagtttagaacttccaagagacttgttcgatgggtttgacaaaaacgcggataatgatatgaacaataagttcaaagttgaagtggtctcagatgcagatgaggaacttgtggggaactgaagcaaaaatgactcttgctatgttttagcaaagagactggcagcattttgcacctgccctagagatttttggaactttgaacttgagagagatgattagggtatctggcagaagaaatttctaagcagcaaagaattcaagaggtgacttgggtgctgttaaaggcattcagtttcaaaagggacacaaagcataaaagtttggaaaatttgcagcctgacaatgcaatataaaagaaaatctttttttctgaagagaaattcaagccatctgcagaaatttgcataaggaggagctgaatgtcaatccccaagacaatagggaaaatgtctccagggcatgtcagaggtcttcacatcagcccctcccatcacaggcctgaaggcctaggaggaaacagtggtttcatgggatgggcccagggttcctatgctgtatgaagcatagggacttggtgtttgtgtcctcgccactccagccatgactgaaacgggccaatgaagagcctgggccatggcttcagagggtgcaagcctcaagccttggcaactgtcaagaattggggtttgggaacctctgcctagatttcagaggatgtacggaaacgcctggatgtccagtcagaagtttgctgcaggggtgggtccctcatatagaacctctgccagggcagtgtggaaggaaaatatggggtcagagtcaccacacagtgttttaactagggcacttcctactggagctgtgaaaagagggccactgtcctccagaacccagaatggtagatccactgacagcttacactgtgggcctggaaaagccaaagacactcaacaccagcctgtgaaagcagttgtgagggaggctgtaccctgcaaagccacagaggcagagctgctcaaggccatgtgagcccacctcttgcatcagcatgacctggatgtgagacatggagtcaaaggagatcattctggagctgtaagacttaactgccccactggattttggacttgcatgaggcctgtgtcccctttgttttggccactttttcccatttggaatggctgtatttacctaatccctgtacccacattgtatctaggaagtaactaacttgcttttgattttacaggctcatagtcagaaaagacttaccttttctcagatgagaatttggactgtggacttttgagttaatgctgaaatgagtaaaggctttgagggactattgggaagccatgattcattttgaaatgtgaggacatgagatttgggaggggctggggtgaaatgatacagcttggttgtgttcccatccaaatctcatcttgaatttccaggtgttgtgggagggaccaggtgaaaggtaattgaatcatgggggcaagtctttcccatgctgttctcatgatagtgaataagtctcactagatctgatggttttaaaaatgggaacttttctgcacaagctctctcttttcctgatgccatacatgtaagacataacttgctcttccttgccttccaccctgattgtgaggcttccccagccacatggaactgtaagtccaatcaaacctctatcttttgtaaattgtccagtcttgggtatgtctatttcagcagtgtgaaaacggactaacacaccttcagaagtggagtttttctcttggcccctaataaactggaacttcaaggattcagctgggaaggggaatatttccaggcacccatggttacacagctggtgagaaaattcccaaaggctttatggagttctggcactttgggtgaatcacttcctggcctcaggactcatttccttattatttagttgtggaagttgaattaaagttgattccatccagctcttactttctattgtttgacctgagtcataaaaaataggatttggacttgcagagataaaagagaaaaggatattcccagaggagactagcagggagtattctttaatcagaaacatcacccttgttgaccaccatctatagaacatttaattcagcagttgcttcctgagcatctaccatatacccaggagagatgttcaaaatacttaacagctaggcgtgggccccaatggcctaaggaatggatgctggccaaggtgctggggcagggtctagggacctctgctgggccagtgttacctaacaggggatcttgatgaggtcctgggataggagcagagtggccaggaaaagaagggggagtattaccatggtagctcggtgcagtgacttgttactaataacatgtaaattctcacactccaatgtgtcaaagttgagtaaaattcagcccctttcctcagtctctcaagcaagcaatgctcccatgagccagcaacttcatcagtgggaatgacaatgagtgacaaggcccagtagaggcagccagcccacgagaggcaggggattgactccctccaactgccagggaggtgagatcaggcacagtcttcctctcaggggtcattcctaacccagacagtgctcaggggaaaggacagacatttccctctgtgcagatccaagcggtaggccgattaccaggggcagctaccacaaatgtaaatacagagtgaaaaatggaggcaaggccaaatgaacgctggcaggtctagggtgatgggcctcctgtgtcaggaatcttgcaaccgccaccggggaggggtgtaatataataacaacagtcagaagtgacattggccataaacctccaacacatgccagctgaaaaccgggccttaacaagtccagtattgatgccctggacctgacactgtgttaatacattatccaaatgcactctctcatttgattatcaaaccactctgtgaggaaggtactttattttgtactttttttagatggagatttgctcttatcgcccaggctggagtgcaatggcacaatttcggctcacttgcaacctccgcctcccaggttcaagcgattctcccacctcagcctcccaagtagctgggattacaggtgcccgccaccatgcccgactaatttctgtatttttagtagagacaaggtttcaccatgttagccaggctggtctggaacacctgacctcaggtgatctgctcactttggcctcccaaagtgctgggattacaggcatcagccaccgcacctggccgatgaaggtactttattattttcatattagagaaggagaaactaggcctttgtaaggccaaagcttacaaagcaagttagaagctaagccagagcttgcactaaggcctgactgaccctggggtctagtccttaaccacagtgctgagccatcttcttaaacttgcacagttaatgtgtaactgaaaccacacctacccacgtgctggctgacaaattccaggtccttcaggcagcatgaatacttcatccttgaaaatttttctggatccttaaatcagacaaatgaacccacagtcctcctgcccatggaagacaccattagccttcccaataaggaaaattactgggatgctattttgacatactgagagtttttcccccagaatttcattgcatctcattcctttcttcctttccaaccatcaggccatttcttgttaactgcgtgggagaaagtatagaagaataagaaaaagcaagggagctgaagtaggccctactgatgctgcatccatgccccttcagtcctcgccacttctgggcatccctgtgcaacatccagctgccatgtctgcattcctttaccttagaactttctcctcccagacccaagggaggccaatgtgccagagaaataacttctataagcagctgtcatccaataactaatgcaaactggtagataaataccccagctccctcacctgtcaggtgaaataacttaggggcttgtattccccctttttatagaacaatgttctaaatttgtttcaagttttagattcaaggggtacatgtacagatgtattacatgggtatactgcatgatgatgcggtttgggcttctagtgatcccattgtccaagtagtgggcctagcactcaataggtagttttccagcccttgcctcccttccttcctccccagtgtctattgttctgctctttgtgtctctgtgtacccaatgctcacctcccacttataagtgagaacgtgcagtatttggttttctgtttctgccttaattctcttaggataatggcctgcagctgcacccatgtcactggacaggaaatgattttgttctttttcatggctgcaggaggcttgcattctatgccagctctcagaactccccagcaggattaagcagccactcacagtgattactggtttgatgacacacattttgctggctgctttctctgcccttccctacttctctaccagcacttcccagaaccacctcccaaataaaccttctcagagtctgctcctaggaggaagccagcctaaggcaggagtgatttcttcattctaagtcttaaagtttaagccccaaggaactcaaagcatagaataatggcaatcagaaacaacagtgtttcattctcagaactagaaaagattccttgattttggagaaagaaagccaggatgccaggaccttcagactttctgacaaagtgatgcttgtactctgccaccacttccccaccccctgttctgagccaagtagggagaaaagcagaaactgcagagagtttgggggtctctaagagcagattgacctggcttggcctctctagtgggagccaggcaggggccaggaaactggaaaaaacatcaagctgcatgggacgtctaggctgaccatgccaggcaacctcatggagcgctcatgagcacaaaaactccaaacacacagaggctcagaagcagggcgccctccaacccatggtggagggatatgtttccccatctgccccagatggcaggggcttggcacagggcttccaaacagatgaccagataggtcacacatgtctcatatcctggagaggacacctgtgtgcccgcctcacacctcggctgcactcctgaatttgcagtggttttgatcctcatcagactgacagtatcctgcctaagtgcacactgagctttttccttttctgcaccgcagcttctccaacactgccagcaggggaggagacaggcaggtgggaactcagccacaggaacacaggagcagcagagaagtgctggggagatgtcccatcctctagacaagcttccaccaacgggaaagagagcagctgggaacatcgacctcacataaacaactccaagaggccttcgccatattcctcagagcatcctggttggactgaactccagctgtctctagcatgaccaactcaataacccaccatgttctgaaccttcccagtgactcatttcctggagtcagctcccaaataaaccacctgcacacaagttcttacctcaggtctgctttcacgggaaacccaggtcaaatacatgctcagaagttaccaaatacacaaggatgatggggaggacctgttcccccacaccatagaagccccacagaactagatgcaacctctttgaaactgcaaaaaccctcatcagctgcaatttccataacccctaagaatgggacctcacaaaagaaattaagttcagctattaaaaaaaataggcagaactactcttgcatttcttgaacacatagaaacattacctttgacccaaggatgagataagaaagcagggtgctcatgctcctctgtccctgcaggccaggtggacaggcttcatggagaactgaggtgctgccgcaactctttgctcacaagtgaccatgaccctgatgagatgggcagcccgagactccaagtagacaatcaagagggcctttaaggacatcctccaggcagttctggatagacgaggctttagtgaaacaggcaggtcaaagggtattgctacttccacagtgtaaaaagccaaccaggtgctccatttctcttggctcctgtccagagtctaaagcatgagctcatctcagaagcccacgttccacatgcaaggggtcaggggtgcctgggttctgttcctgagtagctgggaccacaggcactttccaccatgccagggtaattattctatttttttgtagagatgaagtttccctatgttgcccaggctggtctgaactactggtctcagggaatcctcttgcctcagcctctcaaagtgctgggattataggcattaaccacagcacccgtcctgagcctgcatccttgaagacattgttaagccactgacttaattctgtcattttcttatatctgactgtcttgttataggataatcggccctgtttttaaagatttttattgagatttcacttttatctgtgatcagtaagtgaaaatggtgttttaagtaaatagagcttttgcaactactagagttttcataaactaagtattaagaacaactgtatgccatttcaatctttaagaatgaaatataccataaaaattcagtaatctggcctcttctagcctgggaggatgctaggttactgggttttccaggtcagtgaaagatactgtcttgattctcccaaacaccctaatttcacagttataaatttaaagaaaaaacaaaatctgtaatatacttgaacagaaattcccagttttcatggaaagttttctgtgtaacatttattataactacataattctatttattttgaagccctaaaagtttaattattttttaatataaaaattattttaatataaaagacattcaattgctaaaaaatgttactttaaaacaactttcaagcctgtggctaaaccaatcatttgaagtgctcttcctggcacatcctagcaaaagccaggatcacgatgttgattatgacaagactttgacccaagttgtcacaggagtagctgaggatgaagcagtagatgaggtcactgggctttgactctgccatgacaatctgggtggctttaacctctctgagctgactgtgcatttgcaaaatggtctcattagcaccacctcttacagctacaggagagagagagagcacgcatggaagatgcaaagtggtcagtagtttcatggcacacagtgagggcacagcccatggtgaatgcaattgatttttaaccatctctccatccatcccctgtggggccttcctttgcacctccagtaaccattgcttcctcctttctcaagtacacagcactctttgcaaatcacatacctaattacgtctaacatcttcctgatggtctctatccatttcctgtgtttcaatttcatctccaataacactagaatctcccagggcaaggcccattgcacaccccgcctccaacatcctccacagcacctcagtcagtgccaggtgtgcaaagtctgcctggataaattctcccctgactccttccccggtgggcggggggatgtgggagaggtgtcatgggaagacatttctgtctcctgaataacagttactgggtctacgtgaattcttcttgggatagtttccaatgtacactgcaggaaactacagaatgaatagtatctttaaaaaaattctttcttcatatggtatatatacaccatagaatattatgcagccataaaaagaatgaaaccatgccctttgcagcaacatggatgaagctggaggccattatcctaagcaaactaacacagggaaagaaaaccaaatgccacttgttctcacttataagtgggagctaaacattgtgtacccatgggcataaagatgaaaatagtaaacactagggactccaaaaggcgggaggaagggagggagttgagggttgaaagattatctattggatacaaagctcaatatttgggtgatggatacaatagaagcccaatccccaccaatatgcaatatgcccatgtaacaaacatgcacaggcacatgtacctcctgaatctaaaattaaacataaaatgcattcttacagttcaacaacaaagaaggtgcccttttctgccttctcaccatgtctcatagttccagctgtgtggctgcatctgtggagggaaggtccctgaggcttcctgaagacccttgagccctggctataacagagactgtggctgaaatgttaacagtgctacctgtcaggctccaatgccaggctgctgggggtggcaattggcctcttcaaagctcaggactcaaaaagaaaggtagaaggatgctctcacctgctgtggaggacatctgcttgttttggtcattcagcctgattagggcactttgattttctttttgggatccacatctccccttctcacccatgtggtggggtcttctctccttacatgtccagaaagcccagaaatacatacattacccaatacaagccagctgaactcaatgccagggctttagtatagagaaacattccttattctgtgacctggagcttgcagaggtcaccacatggacagaggcagcctgtgaataaagccagaatgcaggaagcacaggagagagaaagaaccaaagtagcatcagacttcctggagtttttagttaagttggcaatcagattctctttcatgctttatttttcttttcaatttcaacttttgtttcagatacagggggtacatgtgcagggaatattgcatgatgctgaggtttgggtatggatcccatcacgcgggtagtgaacatagtacccaataggtagcctttcaacccatattctcctcccttccttccccccaagtggtccccagtgtccattgttgccatgtttatgtccaaacgtgttcaatgtttagctcccacttacaagtgaaaacatgcagtgtttgggttttctgtttctctgttattttgcttaggattatggcctctagctgaatccatgttgctgcaaagggcatgattttattcttttttatggctgtatagtattccatggtatatatatatataccacattttctttacccagtctaccattgatgggcccttgggtggattccttgtctttgctattgtgaatagtgcagcagtgaacccaccaaggcatgtgtctttttggtagaatgatttattttcctttggatatatacccagcaatgggattgctgggtaaaatggtaggtctgttttaagtgttttgagaaatctccagaaaactttccacagtagctacactaatttatattcctgccaaaagtgcataagtgttcccttttctccaaaggctcatcagcatttgttcttttttgacttttcatttttttcaatttttttgacagagtctcgctctctcaccaggctggagtacagtggcacgatcttggctcactgcaacctccgcttcccagattcaagcgattctcctgcctcagcctcccgaatagctgggactacaggcatgcaccaccatgcccagctaatgtttgtatttttagtagagacaggggtttcaccatgttggccaggatggtctcgatctcttgacctcgtgatctgcccaccttggcctcccaaggtgctgggattacacacatgagccaccacacccggcagttttttgacttttagtaatagccatactgactagtgtgagatggtaacaaactgtggttttgatttgcatttctctgattactagtgatgccaactcttttttcatacatttgttgtctgccttcatgtcttcttttgaggagcatctgttcatgtcctttgcccatttcttaaggggtttatttgttacatgcttattggtttcatttccatatagattctggataggggtgccttgtttgcaagtatctcctcccactctgtaagttgtctgtttacattattgatagtttcttttgctgtgcagaagctttttagtttcattaggtccaagttgtcaattcttgtttttgttgcaattgcttttggggacttagccaaaaaaattttgccaaggcctatgtcaggaagagtaatttctaggttttctgttaggattttcataattgtaggtcttgaatttaaatgtttgatctattttgagttaactttttatatggtgaaaggtaggagtccagcttcaatcttctgcatatggctagtcagttatcttagcaccatttattgaatgaggagtcctttcccccattgcttgtttttgttggccttgccaaaaatcagatggttgtaggtgtgcagcttaatttccgagttttctttttcgttccattattttatgtgtctgtttttataccagtgccacgctgttttggttactgtagctttatagtagaattgaaagtcaggtagtgcaatgcctctgggtttattctttttgcttaggattgtttatgttatttgggcttctttttgcttccatattaattttataatagtttctctaattctgtgaagaataatgatatagtttgaattttaatcccccatgttgaaggtagggcctggtgggagatgtttgggtcatgggggcagatctctcatggcttggtgctgtactcagatagcgagtgagttctcatgaaatctggttgctataaagtgtggcatctcctctcccactctctctcttgctcctgctttcaccatttgtcacacaagctcccactttacattctgccatgaccaaaagctccctgaggcctccccagaagccaagcagatgccagtgccacagttttatagcctgcagatccatgagccaattaaacctcctttctttacaaattatccagtctcaggtattctttatagtgatgcaagaatagcctaatacaaatgacactggtagtttgatagaaatagcattgaatctgcaaattgggcagtgtgaccatttttatgatattgattcttccagtccattagcatagcatgtttttccatttatttgtgtcatccctgatttctttcagcagtgttttgtggttctccttgaagatatctttcacctccttggttagctgtattcttaggtatttcattttctttgtggctattgtaggtgggattgtgttctggacttgactcagtctggacgttgttgttgtattgaaatgctactgattttcaaaactttattttgtattttgaactttgctaaattgtttatcagctctaggagtctttaggattttctgggtgtagaaccatattgtcagtgaagagagatagtttgaatttttctttttcttttttggatgtcttttatttatttttcttaactgattgctctggctaggacttccagtactatgttgataggagtggtgagagtggacatccttttcttgttccagttctcaaagggaatagtttcagcttttgaccattcagtatgatactggctgtgggtttgtcatagatggctcttattattgctagatatgttccttcgatacttgtctgttgagggtttttaccatgaagagttgttggattaaatgtttttatagacagttttaaatgtattatacactattggaaagggcttcctgacacttgctgcttaaagcatctgagtaacagacttccaaacaaattgaatagagacttcagctaataccaactcattacaaaattatcctttttttgtttttatagtaatcttctatacatcatctcatttcacccttgaagcagtaagtcaggaacttgagcccttattttacagatggggaacctggggccaagaaagtgctatgagttgtgcaggatcccttggtgtaggtcaaaaaaccagctccactgcagagctgcctgtaccaggctatgttcacctttgtaacttctacaaaacatcaccttcaagctttataaggtcaggataaatttatttcctatcagtaacactacttaaagcactgcttttgtattatggctactgtgtcagtaaagcacaggtgaaatctttttgcaaaccagctcccttccccaacatactgttctcataactgtatatgctctgcaatgcttaattcactgatttcatgaactcgctggaagaataagaggattagtaagagattagtttagataacttgaatctctgtagaaaaaaaaaatcacagtcattctttaagctcctgaagattcagcatttggggagggagagaaaagccgaatatctgaccaacactatgtttcactaacattcttggctttaaatctgcaaaacaaaaggttttacaaatgttaggctaattgttaaatgtgttttgaactttccagttcaaaagcagtcttcagataatcatttttcctaggttttggaagctctgcatgcttcaaaaactctagaagtttaatcaataatgtggatgtcaatgttaattaccctcacacacactagactagtcaggataggctaggttttgctgtaataacaaacaaccctaatatctcagggctcaccacagcaaagctttagtttttgattactctccaggatggtttggttatgccaggatctctgctaatactgaccactcttaaacccatgctgactggaagtgagttttgagatgtgcctctacagttgctccaggaggagaaagaacaaagtgaatcaagcacgagttcttaaaacttccccccggaaatgacacacatcatctccacaggcgcatcattggctagcaaatcacatggccaagtccaactccaaaagggcagggaagttaacctgccatgtgcctggaaaggggaaaagacagcatacagagcttaacacgtgtgatcctcacaactctacaagacaggagagccagaggtgattatttctatattaaatggggacaccaacaacagaaagacccccatgttataggtagagaacttgggtgtcctggctctgtgccaagttttcttttcaccatatcatcagaatctggagttcccagataccaactgcttgagagcaagctagcaaagagacacgaaagtcagtttaaaatatatcctggaaagtttgagttgtgataactgatggaatatcaaagttggataagatgatggaagtgctgcctggaaaccacttggactaggtgatatctaagtatttcaaggagacacaataagaatggagattttgcagaaaaaaaaaaaagaatggagattttgaaagagaaaaggaggtgaccggggcctccagtccccttgccaatcaactcagaggtgttttgcattcacagttttctatactgggtttcagcacaacattcatttgaagaaaatttccttcaatttaattatattaaaaatgaaaaccactgactgcagtccaagcactttgttttgcagatggagagagtgaggcttaaagaaaggagataacttccgcacgaggacagagtggcagggctggagccagtcatcaaatagacggggtctggactgagagttggaagcccaaggacctggtttcaacactctgctgtgctgccacaggcaagccactccacgtctctgaacctgtgtccttttctgtccagtgagcacagaatgtctgtcctgtcaaatgcggctagaaagcagacatagaaagataattttacattgagaagacttcaaatgagaataccaacaaatatttgtttctcactattaaattagtaacttaaacatctcatttctgatttctagccagcacgtggagaattggttcatgtgaagcagcatgtgtgctgcttactcagcctctttgaagaacaatttaaaaataaaaattaaaagccagctgggcgcggtggctcacgcctgtaatcccatcactttgggaggccgaggcgggcagatcgtgagttcagaagatcgagaccatcctggctaacatggtgaaaacccgtctctactaaaaatacaaaaaaaaaaaaaaatagcggggcatggtggtgggcgcctgtagtctcagctactcaggaggctgaggcaggagaatggcgtgaacccgggaggcagagcttacagtgagcccagattgtgccactgcactccagcctgggcgacagagtgagattccatctccaaaaaaaaaaaaaatcaaaagccactagaaatgttcatagcttttgatctaataattacagttccaggaattcagtctttgggggaaatcttaaacaccagaacctatgtatactaaaatgtccctcttaatattatttagaatgacaaatattgaaaaatgaatgaaatgtggagtaaaatgtgataaatccattgaaagttagactatggagaatataggaaaacataggcaaatgcttaggatacaatcaatattaagtgaagaaaccaaggttcaaattgattgtagctatataataagaaagggatacacatttaaaagacaacacagactaggtgtggtgactcatgcctgtaattttagcacttttggaagccgaggcaggaggatcccttgagtttgagaccagcctgggcaacatggtgagatcttgtctctataataaataaaaatgaaaaagactacatggatataatgggttattgttttattttctccttttctctattttataaactttctggtatgcaaatatattgattttattttaaaaaataagtacaataaaaatatttccaatatctgccctgctgtgagggttaccagcagaaacaaattgtacaactggtgtgaaagtattttgtcctcattaaaggtagtctgtggttaagtgatcactatgatcagtgttaaattatgtttggttccaacccactcactttcagttgaacactgctattctattccttatttttctggaattgaactaagagaacaagagggcagattctcacccaatttcatatttaattaagcttttaggacacatttctctcttgtaggtttgatcaactgaaatatactagaagcttatccttctgtagaacgaaatacaggagataattctttatggttacaatgtctttgagtaaacggacttgagtgagaaacataggcattcacagctctgtgaagaagcacctccaagaactttccccatcagggccagtgtattcatccgcactcagcagttgcttcctgaaatttgaaatgagtcaagatgctcagaatggcctccatagtgtggggcaaacagaaggagtttagcagcaagcttgttacagctcactggctcccagagcacggctgcccatccttccccggagccgcctcactccagacatgggctctgcttttcctccctgacccgccaatcactcttccttttgcttgcaagcagctgaacagctttatttgtgtttctcatcacagttttattttcacttcaataattctgttcaaaaattatccaaatacttggtttttgccatatgaataggcgagcccagaaaagaggaaaggcataaacaagtgtccgcttgtcatttacaccaaggtacagttcacactgtttcaaatactttacccaaacacagtctaagagattgaagcactgattttcacacacctacttaaaatttttaggaaaatggagcagatagcacacaaaccagtaagtcagctaactagtccacaaatatgcaccaacctacatgcccggtgctgtgccacaggctgtgtgacaatgcatgctcttcacctgctgacagtttgtagttcagcaaaaaaatgaaaaagtccatataagataaaaaataataatacagtagcactggcatccaaggacaagtcaaagtgtcagaaaagatggggctggaaggatggtggaaggctttctgaaagaggtgggaatggaggggtgtgggcagatgggaagagtttggctgaacagagaggatggggaacggataaaatgtaaggacaccctgcagaaacagaggtgggtgtaagcacaggaagtggaaggagctgctggggatagtatgcaagttaaatgaagaagctcaggagagtggaacggggcctaaatacccttgggaatctctttttcagatgaaatccctgacctcagcttatgtttgatgctaggagctgattcgtcataccaagaagcagtgggaggatagaggcactccagccttaaaagccaagagacaaggagcacccaggacgaagagaagcgtgactaccaaaacgcttgctggtgcaatgagaatctgtgtccttcaccagagctgtctcgaattatcttgaaattgcatccatcatccaggccatcttcctgcaggcaaaggggatagaagctttctgtagccctcaccctctccagcctcccagactcctgtcttcctcagggggaattaagctcgccagacacagcagaactagggagacttcagagaagtgaggtctctcaaccaaagaaagccctctgaaaaatgcctcttactctgacttaaatgaagagcgagtcgcataaaaccaaagctgaaatcagggatttcatctctgaaagaagtgctcaggactattttgacccacatttctattaagcccagtctcctttttgtttaaatttacacagcaaaacaaatccattaattttgctagtgatgaccaacagatcctcaaaacagaaagtgtttactgcagaagttttagagagaatttgtataacatgtttaaaacagtagggattaaatctaagttatctagaactccagacatttggaaagctcattcctacgtctgactcagggttaaagtgtggttccttcatgccaagctcggtgtctgctacaaatagtaagtcccatgagctatgaaagcttgggggtgagaaatgcgggtgatggcaataggaaatatcttggatcctattgttctttctggctacataggtcagagtcccagcaggaaatcatttatcccaaattttcctaataaataaatcactacttacagagatgtggagacagtggagagaacaaataaggaacattgaggtacccagagactagaaacagctgggagctgttgccagcccaaggacttcagaggccaaggggaggaattggtgttacctgagggcaagggacatagaagagggactgcccagaagatgctgtagatgtggggggcacagctgctgccaaagatatgcactggtcaaggaggaggctgggtaattatactggtcctttctctctcacaccctttgattctttgctagtagcttccactggtcaaatctaactagaagccagaaagaaggggactctcaggtaataatgtccacgagagtcagcctccagggcacagaacaggcagagactggagaaggataggtgtgcgggtgctaagagaataagcacatcactgttaggaaagctatttttaactcagattctacaaagattagtattcttattgccaaggagtcagcagaattttgctcagcagaactttgctcagaagcaggacacagaagacaagactcagactccagcattctctcaaagagacgagcgtgcacacatgcacatgggtctgcacacacagtttcaagatggattttcataatgaaagcagaaggaatataaaagttagcattctaaatatggaagaccttagcattcttttttcaccccaccccagaaaattggccactacaataataccctcagtcagaagatccaaacagcttttctgggaaatccaaccatccaaagagaaagaccttaagatatagacatagagatgcccaaccaaaatgacccagcctttaatggaagccactgctgttcactaaagtctaagcgcagaaagtatacctacacataggtttagagctctctatcaccattttggtcccccaactattaaacataaacagacagccaaagctcaccagacttttgagagaatacttctaatattcatgaaaaagaccaaaacagaaaaaggcaactgagataaaatagtacgaaaggagaggaaacttccaaaaaactataattaaacacaaacagatcaagaggagagaaacccttagagagcaaaagaggtatcttcagaaagagaaaatatgactgcaggggaaaaaactcaaaagatagaataaaggagaaacttgaggaaattgtccaggaaatagaacataaagaaatgggaagaaaagagaaaaaaattcaacagaccaaataataagaatcctcaaaggaaaaacagataatacagtgaaagtcataagtaaaatcaagcaaatcttagatctaaaggactcaagattctaatttgaaaaggtgctaccaacagcccagcacggcagataaaattagcccacatgaatgcacatcattatgaaatttcagaacactgaggcaaaagatcaaaaatttttccagaaagggagtaaaacaataaaagtcatatacaaagatcaagtctcagaatagtaaagaccttctcaaagccacactgaagaggaagacattggagaaatgccttcaaaacatggaaggtaagttattactttttttttttttttttttttgagatggaatctcactctgttgcccaggctggagtgcagtggcgccatctcggctcactccaacctccacctaccgggttcaagtgattctcctgcctccgcctcccaagtagctgggattacaggtacccgtcactacgcctggctaattcttgtatttttagtagagacagggtttcactatgttggctaggctggtctcaaactcctgacctcaagtgatccgcccaccttggccttccaaagtgctgggattacagtcatgggccactgcgcctggccgagggtaaattatttttaacctagaattctacgcttggctaaattattattaaaacatagaataaagctattttaattcatgcaagttctcaaaatttttacatttgatgcactcattctcaggacatgctctgataaaatgaagttaattgagaaaaatggaagcctttgtaaacagaagatgcaggcctggtgtggtggctcacgcctgtaatcccagcactttgggaggctgaggcaggtgcatcacctgaggtcaggagtttgagaccagcctggccaacatggtgaaaccctgtgtctactgaaaatacaaaaactagccaagtgtggtggtgggcacctgtaatcctagctactcaggaggcagaggcaggagaacctgggaggcggaggttgcagtgaaccgagattgtgccatcccactccagcctgagcgataagagcgaaactccatctcaaaacaaacaaacaaaaaacaaaatatgcaacacaaaggggaagcggaggaaatccccgaggtgtcagatccactccaagagtgcactggcaggagaggcagctcatccagaggaaagcaggtggagggctcaggaagagatgcctcataaagatggaatggatagactctccactgtgttaaacataccaagaggagactatacaactaaaagtgagttgggggataatttggttataaccaaattatagcttaaaaaatgttaaaaagtagtattaattctagaaaattaatgagttatgtaccaaaagaaaaataatcaagatgccacatagtttagctgtgcaccaggcttaatcgtcatttaatgtaaacactgaatggcgacaaaccaaaaattagatctccatagcgacagaatggaaaataagacatatgcaaagatacagtgataaaaaggaaacacgtggaagacagctgaattatcatctttgatagtgagaattaaatagataatactaagtctgagaaattaatataagcattttatttagagatagggagttaaacactcaaagagtccatgaaaagagttaccaggtcttgcctctgtgtaacaggagtaaaaatgagatgtctggtgaatttcttatttaaaaacaagcctcgtagaactatttgactctaaacattgtgcagaaacaccttggaaaaaaattaaacctactttttaaaaatgggtttaagtaaatagtcagacaaaccccaattaagggacattccacaaaaagattggtctggactcctcaaaaataccagttgtacaattattatgcctgaattgtaaactatttcctttaaatatcaattaataaaactcaaagaaaggctgaaaaattgctccagattaaagtaaactaaagaaacatgagaactaaatgtcatatatgatcctggactagatcctggaatagaaaaaaaaggtgatttaaaaaacataattgagacaattcaatgtgacattttctgaattttataactttacaggaattaggtaaaagaatgttcttgctaaaaaaaaaatacacactaaaggtgaagaatgatgttatatgaatttactcaccgtttaaatatatatggcatatgtcaggcactgtatggtttatatcccatgcattgcctctgtaaagtattacagcaactgcattaagtactttctacagctacttctatttcacagaaggggaaaatgaatcttagagaagctcagagaaacaggaagtgacagagccaagactagaaggtgaatctatttccccattttctccattatcctttttcatttttaatgaactttcgtttttaaaacaattttagatttacagaaaaattgagaagatagggatgataaaccaagttacattagcaaaaatggtgaaataggagttccaagcactccatctcacagaaatgtaaatttaaacaaccatgcgaatgagaaaataacttcacaaaaatgaaggaattcaagtgtaaagattatagcacctgggtgaagcaaagacataagaaaagatgcatgaaggtgagaaggataggttcatatcacttgtgtcaaccctccccaaagcctgaacagcacaacacagagatggacgccatccaaatgggaaagaagtgagcatctgacttcacctccacatcaggcccgcccagtagacccgaggaccaggtcagctgcctccacatcaggcctgcccagtggaccctgggaccaggtcagcttccgtggaactaggctacaggccagccccaggagaaccaacctccaagcccatcctagcaccaaaccaaaccctgcaaagccaggctataccatgccctgtgaaccctgcaccaggccagccctcagatccagtctccaagcctgtcactatggactcaggccccagatccaccccagcaccaggccaccattgtccccggacccaggccagccccatagacccaggttccaagtgcaccttctcagatcaaggctccagactcacccgcactgactctggcaccaggctaggccccagagaccttggatacaggaccactccaatagattcccatgctgagctggcttctgaagacccaggccctaggtctaccctgcagactcaggatccaggcccacccgaattccaggccagtccccacagacccaagctccaggccaaccccagcagacccaggcttcaggctgccccaccccaacagtcccagacaccaggctagtacctacagacccaggctttaaggcctgcttctatagtcccaggcaccaagcccactgccacagattcaggatccagactcaatcctgcagacccggtagccaggcccatcccagtgtactctagcactaggccaaataccgagaacacagaccaacacctaaaaaccgaggcaccgttactgctcacatgctgacccaggcactagggcagactgctcaaggactccatcagcaagcccaaccatggaccacatcaactgtcctatccagaactctggacaggctgattagtgaagaacttttcctgctgaagccagtctgtaaacactggaagaggtgacttcttgaaatgtgcagataccaatgcaaggccacaacaatcacaaataatcaagaaaacatgacaccaccaaagcaacaaaatagagcaagagtaaccaaacctaaagaaatgaagacatatgaactgctagaaaagtttcaaaattatcacattttagaagcttggtaagctacaagaataacagacaactaaacaaagtcacacaaacaatacatgaaaaaatttctaatttcaacaagagacagaaacaaaaaaatactttggaactgaagatcacaatgactaaacttttgctgtcaagaatcccacagttggccaggcacaatggctcacgcctgtaatcccagcactttaggaggccaaggcgggtggatcatgaggtcaggaggtcaagaccagcctggacaagatggtgaaacacagtctctactaaaactacaaaaattagccaggcacagtggcaggtgcctgtaatcccagctgctcgggaggctgaagcaggagaatcgcttgaacctgggcggcagaggtcgtagtgagccaagatcacaccactgcactccagcctgggccacagagtgagactctgtctcaaaaatgaaaagaaaaagaaaaagaatcccacagtcatcacaaatgccgagcccagctgacatagctgcctggaatgtacactgcacactgcagtgttccttccaaagatggagccacttctgtgtctcttccctgggcctggagctgctactgtgttgaatccccacccccagctactactgtgttgaatcaccacccccaagtcattaccacacccaatgatctggaatgaaaacaccacagcgcctcaccatatgtgaccaagttgtgctgccctgcacctcactctggggcctgtctctcggctgctgtctgccatcactggtccatgctactgctgctctacccatcccctggaaactgaatcataactttgaactaccattatgaagccccctgggtcatgagtcacagctctgactagccatcactaggaccttgctgcagcttctctgcatcccatgcccacgggtcagagttgtgactgcaacctgccatccactcggctgcactactgctgtgccttacccttcggtcccagaccaccactaagccctgtcaccccatggcctgtgacactgctacatcttggttcaccagtgctgagtcaccatggcatgctttggagacaaagactccatggacaatcttcacgcacctatgcatcagacactgttcccagttccacagaaaatatgccactgccacaggccctgggtgccagggtagttctgtatgtctctgagcagtaaacccaagaaagagtgggatgatatattcaaacactgaaggaaaaattgccaaccacaaatactttatatggcaaaattatccttcagaaatgaaagaaaggtagactttcctagacaaacaaatgtgatattgagagattatgaccactagatgtacctttcaagaaagtctagagttttcaagctaaaacaaaaggacacaaattagtaacttgaaaacatatgaaagtataaagtttactggtaaatgtaaatttattgtaaaaataagaataatactgtaatagaagcatgaaattcacttttaattattttcttaaaagacaaaaatatttaaaataactgtagccacaatattctgataacagatacacaatataaaatgatgtaaattgtaacatcaacaacataaaatataatggagactagtaaaaacatagagctttgtatgcaactgaggttaaattatcaacttaaaatagactgttacaactataagatgttttatgtaagcgttattgtaatccaaagaagatactgtactagatacacaaaagataaaggaatcaaaaccataagggataatgtcatcaaacgacaaagacagcaaaaaagtatgaaagaaactacaaaacagtcagaaaacaattaaaaaaatggcaacagtaagtccttacctatcaataattatctttaaattaagtgcattaaattctccaattaaatgacatagagtggctgaatggataaactaacaagatccaactatatgctctctacaggagacacaatttatcattaaggatacatacaggctgaaagcaaagggatgataaaacatactatgcaagtagaaattttaaaagagcagaggtggttatataagacaaaatagactttaactcaaaaacggtcacaacagacctagaagatcattatataatgatagcatggtcagttcatcaacaggatataacaattgtaaatatttaagcactcaacattggagcacctaaatcaataaatcaaatattaacagaactgaaagtaggaatagaaaacaatacaataatcaaaggagaactcaataccccactctcaacaatggatagatcatccagacagaaaatcaataaagaacttcaacaacactatagatcaaatatacctaacagacatactcagaacttcccacccaacagtagcagaatacattcttgttgagcacacatggaacattctccaggacagatcatatgttaggccacaaaacaaatcttaccaaatttaataagtctgaattcacactaagtatcttttctgaagtaatggtatgaaaccagaacacaataacagaagaaaaactggaaaatttacaaatctgtggaaattaagtaacatacttctgaaaatcagtgagtcaaaggagaaattaaaagaaaatgcaaaaactatcttgagataagtgaaaatggaaacacaacatgccaaaatatacaagggacacagcaacggcacttagagggaagtttacggtgactaacacccacttgaagaaagaagatacatttcaaattaacaacccaacgttatacctcaaggaattagagaacaaagaaaagctaagcccaaggtaagcaaaaggaaagaaataataaaagtcaaagcagaaataaaggaaatgaagactagaaaaataacaggccaatgaaagtaagagatcggtttttgaaaagataaacacaattgacaaaacgttagctagactgaggaaaaaaagacaaaattataaataaatataagcatatataatataaatataaatatatataatttattttatataaaatatatatttatatgtatatatatttatatataatatatttatattttacatgttatataaatatatttatattttataaatatataatatataatataaatttatataaatatataaaactgatacgacagaaatacaaaggatcaaaacaggctgctatgaataattatatgtcaacaaattggataacctaaaacaatggataaattcccagaaacatataagtaatcaagactgaatcatgaaaaaaaaaatcagaacagaccaacagtaagtaaaagataaatcagtaattaatacgtttccagcacagaaaagcccaggaccagatgacttcactgcagaattctaccaaacacttaaagaataattaacaccaatctttctcaaacttttccaaaacactggggaggtgggaacacttacgtatacttttaatgaggccagcattaccttgatagcaatgccagacaaggacattacaaaaaaaaagaaaattagaagccaatattcctgcaagaaaaagggggggagtttgtctgtcccttccatcacgtaaaaacacagggaaaaagcaccatgtatgaggaagaaggcccttaggagacaacaaattcttctggtaccttggtcttggacttcccatcctctagaacaagggtccccaacctccaggccatagaccagtactggtcacaaagcaggaggtgagtggagggcaattgagcaaagctgagctctgcctcctgtcagatcaatggcagcattagattctcataggagtgtgaaccctatcgtgaactgtgcatgtgcgggatttaggttgcatgctcctaatgagaatctaatgcctgatgacctgtcactgtctcccatcacctctagatgggaccatctagttgcaggaaaataagctcaaggctcccactgattctacattatggtgactatgtaataataacagaaatagaatgcactataaatgtaatgcacttgaattatcccaaaaccttcccctccctagtctgtggaaaaatcgtcttccacgaaaccagtccctggtgccaaaaaggtttggggactactgctccagaactgtaggaaataaatttctgatgtttataagttgcccagtctcaaatattttgttatagcagcccaaatgaactaagatagacttcaatcaacatttcttcaaaaaagacatacaaatggcagcagatatgtgaaaagataaccaacatcactaatcatcaaggaaatgtaaatcaaaaccacaatgatatgtcaccacacacctgtttaaatgactattatcaaaaagacaagtattggttaaccccaggcacattgcctatgagttagccctactttggaaaaaaaaaaaaagaaaagataagtgttgatgaggatatcgagaaaaaaggaacctttgtgcactgttggtagaaatgtaaattggcacagacacaagggaaaatgatatggagtttccacaaaaaaaaaaaattgctaatagaactaccatatgatccagcaatcccatgtctaggtacatatactaaggcattgatcagaatcttgaagatatattagcacttataggttctttgcagcactcttcacaatagctgagacatgaaaacaatgtaaattttcatcaatggaagaatgaataaagaaaaaatgtggtatttacattcaatgaaatattattcagtcttaacaaagaaagaaatcttgccattggtaatacatgggcaaacctgaagcacattatgctatttgaaataagccaggcaaaaaaggacaaacactacatgatcccacttatataagtaatctaaaatagccaagctcacagaagtagagagtagaatgacggttgccaggttggggtggaggggaaatggggaagtgttggtcaaaggatacaaagttgcagttatgcatcatgagtaagtcttggatttctattgcacagcatcgtacctataggttaacaattctgggccgggcacggtggctcacacctgtaatcccaacactttaggaggctgaggtggacggatcatgaggtcaggagctcgagaccagcctggccaacatggtgaaaccccgtctctactaaaaatacaaaaagtagccaggtgtggtggcacatgcctgtaatcccagctactcgggaggctgaggcaggagaatagcttgaacctgggaggcagagattgcagtgagccaagatcccaccactgcactccagcctgggacagagctagactccatctcaaaaaaaaaaaaaaatctgtattatatagctaaaagtttgctaagagtttagatttcaattccagcgttcttattaccaaaaatgaataaagaaagagagagggagatatgttttggaggtgatgtgtatatttatgaccactgattgtatcaatagtttcatgggtatatacttatcaaaaaaaaaacttgcatacattaaatgtgtgtggctttttgtatgtcagtaataataaagtagtttgtttttaatgtagcaaacaaaatccagcagcatattaaaagattatataccatgaccaagtgggatttatcccaggaatgcaaggttagtggtttgatgtattaaaatcaaacaatgtaacgcaccagtaggaggaaggcaaaacacatgatcatctcaatggatgtatgcattagtctgcttgcactgctgtaacagagcaccacagcctgggtggcttaagcagcagaaacatgtttcccacaactctagaggctggaagtcccaggatgacagggctggcagagttggtttccggtgaggcctttcttcctggcctgcatttgccactttctcactgaatcctcatgtggcctttcctcagagcatgtgcacttccggtgtcttctctgctttttataaagacacaaatcctattggagtagggccccattcttatgacctcatttaaccttacttactctcttaaaggctctacctccaaatatggttgcattgagggttagagcttcagactatacattgtgggcgtgagggggagagcaactaaatccatagtgatgcagaaaaaatgtttgatgaaagtcagtctccttcactatgagaatctttcacaagccagaaacaaaaggaaacttcctcaaccatataaagggaatctatgagaaactcacagctaacatcatacttaatggtaaaagactgtaaaagattctgtgatcaggaataagacaaagctatgtgttcttgccacttctattcagcattgtgctataagttctagccaaggcaagaaggaaatgaaataaaaaaaagaaaggcattcaaattggaaaggaggaagtaaagtatctatgttaaccgatgatataattttatatgtagaaaattctagagactccatatgaaaactattagagccaataaactcagcaaagcacccaagttgcaacatcaacatccaaaatccagcttatttctacacacttgcaatgaataagccaaaatttaaggtaagaagacaattccattcattatgatagcatccaaaagagtaaaatactagaaataaatttaaccaagaaactgcgagatttatacactgaaaacattcaaaacattattaaaataatcaaagaaaatcctttaaaactggaaagacatcccttcttcacagattgaaagagctattgtcaagatggcaatactactcgagtctatcgatgcaatttctatcaaaatttcaacttttgtttgcagaaatagacaagctgattcttaaaagtatatgaaactgacagtaagcccaaatagtcaaaataatcttgcaaaagaagaaaaaaattggaggactcatacattccaatttcagaacttaccttaaggctataataattaaaaagcatgtagaataaagaataaaattgttattttacctcacagaaatgtatgtttaaaaattaattcaaaatggatcaaagatctaaatataagctaaaactctgaaacccctagaataaaatataggagtacattttcatgaccttgaatttagtgataaatttttaggcatgataccaaaaatacaacaacaaaagcaaagcagataaatctggcatgttaaaaattaaagatttttgtacattgaaaaataatatcaataaaatgaaatgaaaacctacagaattaagcaaaatatttacaaatcatgtgtctgataaggaattagtacacagaataaagagctcttacaactcaatgacaacaaaaaaacaacccaatttttaaatggccaacaaacttgaatagatatttctccaaagaaaatacacatgtggtcaataagcacatgaagagatgtctcacttaacaccatgaggcatgaggaaaatgcatatcaaaaccacaagacaccactttccacccactaggttggctctaatccagaaaagaaaggaaaggaaaggcaaggggaggctaggggaggggaggggagggggaacaattgctgggaaggttgtggagaaactggagccttcatacactgctggtgggaatgtaaaatgctgcagctgctgtgaacggcttggcagttcttcacaaagtggaacatggaattaccatttgaccgaacaattccactcttaggtgtacaccaaagagaactaaaaacgtatgatcacacaataacttgtacatgaatgctcattcatagcagcattattcagattatactaaatgtggaaatcacccaaatgtccatgaactgaggaatgggtaaacaaaatgcggtgtatctatacaatggaatattatttaagcattatacaatgtttaaaataagcaaggtattaaattctcatgtatattacaacacaaataagcctcactgaaagaagccagatattaaaaagccacatatttacaattccatatatatgaaatatccaaaatatgcaaacccgttgaaccagaaggcatattagtggttgtcaggactctgatggttgtttccttggaagatgacgtgggagatgagatgaactcttacacattgtcattcaccactttttgcagtaaggaccatttgttttttcttccttttttacaaagagactcaggagaaggctataaaccaggcagcgaatcatgcctcagcctcctgtcactattttaaacaacagctttgcaaacaaaactagaggttgagggtccactcactccacagcagcccacataaatgcctgggatgcaccatctcactcctgcagatgatttattgacttttttcatcatttgaataaatgactatatcacaagggctcctgaaaggttgctgattaaagtaccctctattgttaaaaacataattaaataatgtttggatttatcactttctttgtaaagatgagacataaaagatattagaatctcaaatgacacagttagaaagtcatccagttaatagtactctttaattatcacagctagccagcactgcagcatgtctgcaatgctttgttatttatggacattaaactgcaaatcaagttgtgaagctctcccctcttataagtagtacaaagactgttaaacaaaacagaatttaaaacagcatggagttataaatagcctgctgtttggtatagtttgtcaatctgttaccacttaacagctctctaattagcactcacttttgatactactgttcctaaaatgtttatgttggaagttacaaattactgtctaattataccggctactttgttttgcataaacaataaataaaatcccatttatgccataaaaatacatgcactgtcatcactttttctataggatgagtaataaactttgctagctttacactgaaaatcagcagtgaacaactttaattaaatttgacagtgtgaggattcatgactttacttctttaaggggtgaattgcttgcaagcaggaaaagtttgcacagaatcaaaagataccatcccagtagaataacaaactcagcatctaaattgcacattccagaaaaaaactttttttcaaattttcagctttttatcttttgccctgcaccaaggaaattggaatatttgtgcttctacagactcagtctgggtgaatcctaaaaatcagtgctagggagaatcagagcatgggagaaacctctatttgaggaaaaaataatcaaggcaatgcttttgataaaattcatttcttggtagatttacttaagttcttcccatgtcatgatgtctccttgtgaaataagccaaattaatcatcaaaaccaatcattctatcattgagaattcctcattcaaactctcctgttgtttatgtgaatgtggatcatattatttgttcaaaaaattcactgtttttactatgaaagagagggagtcgtcataggaggcttatacatcttacttcactgacagctagcatggtggcatgatttgctttaaccagtggaatgtgagcagccacgtctgaacaaaattttgagagccatcacgtggtctgtcatggcacatgaagccatgcatgtactagataaaggttgctccttctgtcgtggtcctggaatgaattgaacagagccacatcaacccatgatacatgtgagcttacaatgatgaaatggtggaagttatttgtgcctatagcataacttagcctaggctgactgatacattcacttaactgctatgggctacgttagcatttagtaaacatccaataaataatagatgaataaactaatagatagatggaatgaaagctgtaaaaattattacttaaattatatctgcatatgcaaatgcaggttctccatgtaacagaaaattattttacattacattgagaccagctatattgtctaaacacaaggcctacacatctatattttacccaaaaagtgaaagttgatccacacctgtattctctgattacagatacaaaatttcagctttttatcttttgccctgcaccaaggaaattggaatatttgtgcttctacaaactcagtctgggtgaaccctaaaaatcagtgctagggagaatcagagcatgggagaaacctctatttcaggaaaaaataatcaaggcaatgcttttgatgaaattcatttcaatacaaaaaattgtatcctatgtcagaggccggcttgttagtttcctttataacctggtcagtggtgacagtcttttcctaacaccctgtacaatcgttgcaatacatctccaacacaacagcactgtgcagtctcatcaatgtgtttcacacactctcttatgttggagacagggccaagtggcagctccaacacatctgcacaatgagggtcatttgaatttggaaaataatcagggcataatatagggcatagctgcctcccacataagcagtctcctggttcagcctgaaaacacaccattttggatttgcttgtatcctaatcgcactgacttatgtaagtacataaaatattcataccccatataaaatctcaaatcgcaatgtccctagcaatcttcactaagtgtcacatgttgtggaaattattcactctggtctgtcagtgttggcgaactctaccttgctggtagagttttgctggaatattaaatttcataactgatatgatttcatatactccaagtctgccacacaagccataactgagaccaatttctcatgaaaccaaaagccctcagcaaagcaaagcactgatcaacactgcatctctggctggacttgtctcagcattctctgcacggtgggcatagagcactgtagaaacaaggagccctttcttgctggtagcaggatgtgcagacaggcaagaccagctgtgagccatgatctgtcattctccctaaaacaagtttcaatatttcacagggaagggacaacattttttttctatccaaaatagtcatcctttcttctattactcccttacttataaaccacaattactgtggttgaagggatgaagtcacagtcagtcctggccaatagaaacttaaaggtcaaggtttccatgagtgcagggcaagtacagctggaggtacccacaaaatgtttaaacagtcaaattgccccttgtgaaggaactaaccttccttttctcccttcaacagatgcacagtgagctcccactatgttccaggcctctgtgaggtgctcaggtaaagcaaggagcaaagctgacatcgttcctgatgtcacaaacctgcaagttgagctttttctttactgcaagaggcaagtaaagaaatcttcacaaccacgagtgaacagcattgcaatagagaaatcacagggtgctgtggaagtgagagagcagctcttcaccttgtctataggacgggtcaggaaaggaaggcttccttggattagtctaaaacataacggatggctccaaggtagccaggtaaagagaaaaatgaaaggaagcttccagcaggagaaagagcaagtgtgatggactagagatgagaatgaccacgaggccaggagaaactgcagaagactgatggagaacgaaaccaagaagagaaatcggggaactgagcctgcagggcagtcaacaaagatctttgaccaaatgttgaagactttggggtatatcctgaaggcgatgaggagccatggaaggagtttcagcaataatcagatttacatgttaatcacatacctttggctacagtgtgagggacagcaggtgtgagtgtggaaagtctagttagggtgctgtattagttgtcattgccatgtgaggaattattccaaaacgtagtgccttagaacagcagcatttattgtctgtctcacggcttctatgggtcaggaatccgggggcaaatttcctggatcctccggctcagtcaccctcaaggctgccaagtgtcatccaggactgcagtcacctcaaggctccactggaaaaggatttgcttctaaattcaatcatggcagtttgcagctgttgggctaaaggcctcagtatctcactgactgctgatcagaggccatatgggagctgacagcacagctgcctatgacctcagattaaacaaggagaggagccagagggagagttggtgagcaagatggaagtcatggtctttcatagtctagcttcagaagttgcatcttgttacttttgccgtattctgttcgtcaggaacaagtcaccacacccaaaccaaactcaagggggagaatatgtcatgtgggcatgaattccaggagacagggatcaaagtgagccatctaaaatgctgcaaaccataagagctattaaaataactcatgcatgagatgctgatggcctatatgagggtagcaatagtagaaagacagaagtgaacaaatgataaatgaatcaaaaggatttggacactggagttagaagacggtagaagtcaagaatgattctcaggttctggtttgagaaagtaggaggatgattatgctacttgctgaaatgtaaacactcaaggagaaataaatttttggaaagaaattttatgcatcttgttttgtaaatattcactttgtggtgcttgtgaaacactgaagcagaattgtcaaataagttgttatctttccaggtctgatttggaacaagagaactatttgtttaaatgtatatattaaaatgaattctactcacttgttaatctggttgtacaaagccatggatgaatgaatggatagatggatggatggatggatggatggatggatggatggacggacagatggacagacggatggatggataaatggatggatagatggatggatagatgaatagatggacaaatggatggatggatgaggtgatgggtggcccatctggtccaaatatgaaaagaagatcatagcagtagtatccatcattccgtaattatctagtcagaaaagatatagatcagcccagaaaaatttttctccggttgcaatgtattgagattgtacaaatccttctgtccttcctttggatatgacacattgactatgacaaccacgttatggagctggtgctcaagccaaattttaagttgtcaagaatgtgaaagcacctgaaatgcaaaggacttgtatgacagctttcagttgcagatgtctctgaccaataagagtaaacaggataggctcagaggattggagttgcaaaatcaagggccatttgccttccgagatccagaaaggtctctcaggattaattgattttgggatatgaagtctggtctcactaaaaaaatgcaggtgtatgacgggaatcagttaactgtgttttagttttattgttcaatgacatctgtttgttgtagcctcccatgaatgttcatgagacataactctgaaactttattttatgacaaagccaaaagatggcaaggcttttcagaaaagccttctgcgaaaacaggtagaattatcttgagcgaacagatcagtcctagcaaatcctggtcttattcatattaatgatggtaggccaggcgtggcgactcatacttgtaaccccagtgctttgggaggctgaggcaggcagaatacatgaggccaggagttccaggccagcctgtaaacatggtgaagccccatctctactaaaaatacaaatattagccagatgtggtggtgcacatctgtagtcccagctactcaggaggctgaggcaggaaaatcgattgaacttgggaggaaaagtttacagtgagctgagatcgtgccactgcagtccagcctgggtgacagagtgcgactctgtctcaaaaaaacaaaacaacaaccaaccaaccaaattaatgatggggggataaaaaaggaacagcatgttggaaacaaatgttcctgggtatccctccactaattcacacatagaccaaaatcctggatgtcattaatgtgcaagatggtagcagcttctttggccacactcctcctttcaggagctctggaaacaaagccacatccttttattcccatctacaaaaccaaaccaacagtcctcctttagttttttcatttcaaggttgtctataaatctttgctaaggagaattctggtgaaactgtcaatgaaggcctgactgaaaatcacaataatttcttctattaactaggggaaaaccagctattcattacggatggttgctaattaattttctaggtgcaattgttaattataacaagaatatattatacctgctgaaggtctggttgaagataaagtagtcaccagaatcctatgaagaacagcaaaatattaataattattaattattaattaatttagttaagtgatcaactaaaaatcagtattacatgtctattgagaatttacaatgtgccaggcatggctctaagcagtttacattgaactttacaaccccaccataggggtgggtattttgtacacaaggaagcagatgtactaaaggatgaagcagcttgcccaaggtgacagaaagagaaactgatttattatgggaggtagggtagaacacttcagagcactgtattttaacctttgtgttcattacaaaactcattccatacaacagtcctgcaaggcaggcagtggaaccatctcgtcttatagatttgaagctgaggctctgagaaaagaaatgactttcctaaagtcatgccgcagcaagagtgggatgcaactcaaacccagcatgaaataattcacagtccatgaccccagctgctggggatagtacatgaatggcaaaataaccattttccaacataagaggataagttctgtttaaggaagtttcaaacattccacaaaactcagcagtgaaagatgagcaagtaaagggaaaactaaagtcactctacatgaagaatcctttaagaagagaaagacgtatcacagtggtgtgagcacctcatcactgatagagttgggcccagcctgactggccttatgtggaggctgatgaaggagggattcttacatcaagaagaggttcagccatgaacctgaggtcctctccaaccccaggactccataattcacatagataaagctcctgtttctttaattcctgggagttttgttctttgtattttgcatttcttactgtaaagcgaaaaaaaaaaagcagattgggaacacaaattttcttaattttctaattttttatttttcagggacggggtcttgctctgtcactcaagctgcagtacagtggcacgatcacagctcactgcagcctggaatttctggactcaagaaatcctcctgcctcagcctccagagtagttgggggtacaggtacatgttaccataccagagtaatttttattttttaatttttttgtagagacggggtctggctatgttacccaggctggtcttgaagtcctggccccaagcaatcctgctgctttgacctcccaaactactgagattacaggaatgagccaccatgcatggcaaattttttttttccatttcaatcatccaacagaattagagatcaggttaggtgatatgaaaaatataaagaactaaacttcagtggttgaatctctaagaagaaaaacaagccctaacattagtaagagtcacatttgaatttagcagggatattttatttttcacctgccactgaagtgatctgtgtggcagagacagacacattgagctgtgagcagcatgggtggatggttcaatgcagactggatgtccttgggttttaggttcggtacttgctttagataaatttctttaaagatttttgtaaatttgactcaaggagatcatgcaataggaattcttttgctgagaccttggatgttagacacttggctcacagatcctaattcagaatgtaaaccacccaagtgctgtcagcctattcagttctgtgacatgagaatgctgtgctttgaacaccatgcttctttcttttctaagagcaagcttctttagcctgccaaactcatgaaacagattttcagcaaagaataaaagcagaaaataaaagaagttggcaatttgcacgtgttcagctcagtctccctctcttaccctatgcaggctgaacttccatgtttctggacacattggctcagggacataacactgcacttgagaaagatgcaatcctcagaagccactaaatagagacccttgtcatccatctaccaagtctatcaaccttgcagcatcactgcctcctctctttctgtcctcgtacaattgaggaaggtccttccacatctgtgcgaaaggcccactgctctgcttgagctgtgcacctcaaccccttcatcctcatgagggaccccactgactctcttgttctctgcccctcctgtatcttcaccaaccccttcatctttgtatatattctgttaacctgcaaaatacttcagtatcttctacctttaaaagaagaaactgtctacctcacacactccttcagagtctgttctatcctttccctcctcttcacagccagtcttcaaaaatatttgagttgtctacctacccacctctacctcctcccactcccattctctcctgaatccaccctgaattggcttcatcctcatgtctccatccaaagagctcttatcatgggcacaagaagaccatgtttctaactcctatgaccttttcttttttctttctttcttctttctttctttttctttctttctttctttctttctttctttctttctttctttctttctttctttctttctttctttcttatttctttctttctttctttctctctttctctctttcttctctttcttctttcttctctttctctctttctttctttcattatttttttttgacagagtcttgctctgtccaccaggctggagtgtgtgatcatggcttactgcagcctcaacctcctcatctcaagcaattctcccatctcagtctcctgagtagctgagactacaggcatgagccaccatgctcggttgattttttatctgttgtacagaaggtgtctttccatgtttcccaggctggtctggaactcgtgagctcaagtgagccttccaaagcgttgggattacaggcatgagttaccactcctagaccagtggcaagatttcaatccccgcttcacctggtctcttgaaagcatttgccatttttattcaaatgccttctattcctggcttctggctttccttggacctttcagtctgtgttcctggaacaccaccttcctcaccctcctttacatatagaagtgcctcccacacgtagactctctagtatctttgctgaattaattgacttgaggccatcctggagaatggtgcagccagtgatggagcaaaacacaaaactcactagtgtaagcttgggagtcagatctgggttcacggcccagctttcttcttaccaattctgtgaccttgagccgctactctctttccttatctctgaaagagagctaaatgataactataataggatttttctgagaatttaattaacactagaattaaaatttcataagggcagagatcttcatcttttttactcaatcaataatccatatcacctgcattctagaggtgttcagcaaataatacctgcacaccaaatctagctctctgcctgtttttgtgtggccccaaagctaagaatggtttttacatttttaaacagttggtgaggaaatgaagattatgtgatagagtcagtgtgtagcccacaaagtctaagatatttactacccacccttcacagaaaaagttgctgtaaatcctgacagaagttagatattcaaaaactattaaatgaatgagtgaatgaataaagtatgtgcgcatctgaagcactgagcagtgaatgcatggagtgtatgccactagctaatgtattgagtgctttcccaaaggacatgctgccatcatcatcactatcgcacacgtggaacttctccagaggaagaccactccacggctcccgatacttgatacttgtcagacaacctgctggaagatgaaatattcggaatacctcttggtctttctaatatcaaaccactcacttgatgctgctttaaaaaaaaactgtttactaaattgagaggttgttgtagttattttatatatttgacgaaaaaatatattttatgaataatttatttcaatttcactgctagtgactcaagcatgatgatgccttcttttttttttttttttttttttttttgagatggagtctcactctgttgcccaggctagagtgcagtggcatgatctcggctcattgaaacctctgcctcccaggttcaagtgattttcctgcctcagcctcccgagtagctgtgattacagacatgcaccaccacacccagataatttttgtatttttagtagagacagcttttcaccatgttggtcaggctgctctcgaactcctgacctcaggtgatccacaggccttggacctccaaagtgctgggattacaggggtggatgtccttactcttaagaacaatggtttctatgcactcaggaccttctgataacttgtttcaggcaaaagaaacccaaatgtgatggatggacatatatgatttttgatacactgcatccattctctgttctttggataatttttccctgttctcttgtaggaaatcaccctttcccactcccagtccatgaatgtctggtgggactgactctacccttgactgcaggagagggcatgggacacaggactgaccagccagtaagtcccattcctatggacatgaaaattggttaaagaacaggcatggcacgttcggagtcagagagagacaatgagactttagtgggccctttgggaagaaaagcatactctcttttccaccaggcttaaactggaaacaatgagggatttgagctactggcagtcatctaacaagtggagtttgttcttagagccaaaagagaagataatagccactgaatgaagagaacttgagcccagtgccttcatgggagcccctggatcaagagttcacctaactctagtcttttcagtcatcatgtgaccaatagatttcaacttcagccaaagccagggtgagttagagctgtttgctttagaggaataaaaaccaaatgatgcacctgtccagttcatcactttccattccatgcttcaagttagtcacccaaataagagaagcaggtagcttttgatgaagcaccatcaggaagcagccattccctcaagaaacatggtactgaaatcatcatgtcagacactccatgtctgtaagaggcctgctgcatgatcttttgagacagaatggcagaattttaaagacagatggaaccttaaagaagaccatatatttaggagattgaaaatccaaaagcacgcaaagccaagaaggaaatgtgattgagtgaagggatcaggaatgagagagcagcaacacaggtaccgtgaaaaatggcaaatgacactcagcctcagggaccaggagcgggaggcggtggtgggcacagggctgcctggggggcacccattcgcctacctgagcagcctctgttcagtgacagctgaccatgtcgaggctcaaagatgcaagattctatgtgaaagctatctttattttctcatattttaagcaatttttatttggttctattatttgtttattcatttcaatagctttagaggtacaagtggtttttttgtcacgtggatgaattctatagcagtgaagtctgagcttatagtatactgcacccatcacccaaatagtgtacattgtacccaataggtgatttttcatccctcatcctcctcccatgatccctcttttctgagtctccaatgttcattatacctctctgtttgcctttgcatacccatagcttagttccttcatataagtgaaaaatgtggtatttgttatttttattccagagtaaatttacttaaaataatggcctccagcttcacccaagttgctacaaaagacattattttgttatatttaatggctgaacagtattccatggtgtatatgtgccatgtgttcttgatccactcatcagttgatgggcacttaggttggttctgtatctttgtggttgtaaattgtgcagtggtaaacatacaactgcaggtgtctttttcacacaatgacttattttcctttttgagatgagggtgaaatgagagaatctctaaactcagtttctctgaaactcaggtctcctcaggctcatggcatgcactgttgtgacattataaaatatgcagggttggtctttgatatgtcttgtttatggtttgttttgccccaccaagtctcaagttaaaatttgatccccagtgttggaggtgaggcctggtgggagggtttgggcagtggagatggattcctcatgaatggcttgatgcccttcttgcaggagtaaatgggtcctcactcttcattcccaagagcactggttgttgacaagagctggcccctcctgctagccctcttacttccttctctcaccatgtgatcgctccacacaccacctcccctccatcttccactgttttcatctgaggccctcatagaagcagatgctggcaccatgcttgtacagcctgcagaatcatgaaccaaataaacctcttttctttataaattacccatcctcatgtattcccttatggcaacacaatcagactaagaaaaatcttcaaccctgtttcctagcatatgacccctaaatccttaatatttccaaagtgatgtctcttgtataccaatgaatttgctgatggctggcagccctaggtagcttcaggatgggtgtggtcaatggaaagaccgaggcacgactagacagtttgggattttcagccccactcccaacctccagggaggagagagaggctgaagaataagttgatcaccaataatttcttcaatcatgcctctgtaatgaagcatccataaaaaaccaaaaagactaagttcagagagcttccagagagttgaacatgtgaaggttcttagagagtggtgcactagtgagggaatgggagctccatgccccttcccccatgtatcccatatgaatctgtttagctgcatcttctgtaatattctttaaaataagctgataaacgagtgtttccctgacttctgcaagtcactctagcaaactaatcaaacccaaagaggggtccacaaaaaccctgacttatagctgggctgtcagaagcacaggcaaaataacctggggcttgtacctgggtttggaggcaggggctgtcttgtggtacagagccctcctcaccctgtggaacctgatgctctcttcagctaggctgtgtcagaactgaattgaatcagaggatacccagctggtgtctactgcaaactgactgcttgcgtggtatgtatggtgagggaaccttcacatatttggtcgtagaaatcttctgtgttgattgttgtgagtgggataagagcacaggaaaaacagttggtgtttttaacactcaactgttaaaaagtcatgcacctaaatgaaggattcaacttcttcaaagatgagtcataatttcctatttccaaacatagtcattgcaaattaagagcatttgatctaatttcaaagacctcagcaccaccctgggtaaatatgttaagtgagtcctagagaaaatgtggacactccgaaacatgagcttgcctctgattttaaaacaagcagcacagcaccagcacagcttagctgggatctgttcatctgtgcatagacaagcaggcataaatgaccttggtttttttcgagctgttcttcccaggggttcaaacctctaattaacttagcttctcattgtttatccaggaaaaaatccagaaacatctcctttatgtccattaaaccatccagtcttaggaagcatccaaaaccagattttagccctcctgagatgcccatgtccagaaagggatttattttaactatgaaacataacattccatttggtcctaattctctggcactataattttttggacacattgttactgaatatatttgttgcagatggttatgtaatagcaacattggagctcggcacataatcagtcatgaaaattgtgtccagctcatgaaataaaaatcagcaatgcttggaagtggggccagatacttctattaacttcctagacattggagggctgggaatttgctctaggtgttaatgaaaaggcagagaggccaaaaaaaaaaaaaaaaaagatttcctctcccttgggggtagtttggctcttcttcacctcttggaatatgcagagctaccaaaaaatatatacaattacaggaatacagagatagctgcctgtttacacagttaaagaaaggcttccctcagggtgcagcaacattgttctttaattttctctggccacagctgcctgctgttttactctgtatatagtcaagaatagattatttcatttctggaaaaagtaggatgatagactaagcaggggttccaccttgggaccctgggttcaagtcctggctctgcctctaactggcaagtcaccgaatctcatggagttttgaaatatctgataaactacatatggacagcttttattcaaataaatatgaccaggaaaaatctccctactaaatgcatctctccttagaaatcttatcacggttgtcattttataggtttttctgggttaatctttgatgaatgttggtccctatggcagacgttgttagtgcctcccctacagcctctcattttagggggttcaaccagtttctgtgtctctggttctgagaccttttattggaatcccggaaggcgattgtcttgcaggctataaatgctaaagaattaacagccagtggcagcagcagtagaccagttattctctggagttgatgtataaacaccccaatctcttaccctttgggaggaatgattctgaagtatgtatttttaaatatttttagcttcccatgggtttaagcttcagtagttcactgtggcatctggcttaatagcaccccctttattgactaccttctctttcctgtgtcactacaccacttctctaccagtgtcacctgaacctacaaagtaaactacttgcactggaatccttgcctcaggatctgcttctgaggcatcccagcctaatataggctttttcataagactttaagcctcaaaatcactgtgtatgacttattcaccatcatccaaagcctaccacagcatatggtaataggacctcagaaataattgaggaaaaatggaggaaatgtttattattgctgctgttgctgctgctgttattcagtgtgtaacacacaatcaacccttcactgagcagagtcaacaattcatctctgattcttggaaaaaatcaggtttagggattcctgtttttcattagtgaaaatgagaacagggttgggaatccaggtctttggggaaaggctgtcaggcaaaaggtcagaatcccagaggcagaggggatttgatctttagtgtgagagcctctgctgacagatacttaccgtctaaaggaggtaatccagaattaaagtcaaattgacaagccattcctgtaattgaggctaaaagcaagataagcgagaagctgtagatatagttagtggcatgaaggacaggcatgtcacctctggaaaaagtacgagttaagccggcacaccacctcctagtgccagtgactcagaggtttcagtgaaacatgcttgggattagtctgcaccgaaggccggcctcacccagctcctgacaaggggtcatttttagcttaaagaggtgccatcagctttaataggcttcaaatcttaccttaaagtcactgactcttcacagggcccagttttccagtatagttcccacctgctggcccatttcacctcattcaggaataagcttgaaaagcaaaagaatccaaagactgtgcttcaagatcaaaagaatcacattagcccaggaatcacagattgaaatgtctacagtcacctggccaggacctgctaagtccaaatgaataactgctcttcagttacaaggcagaagttcagatccagtgtggccagactttttcatgagaagctatatatccgggtttatgagtaaaaattcttctgttcttcaatattaacaagtaattactattttaaaagtaataaaaccaaataataataataaaattactatttaggcaaaattggtagtcagttggtactcaccagctcagctgtcaggattgttaaatattaaaatcattccacttaaattggtaaacaggccaggtgcagtggctcatgcctgtaatttcagcactttgggaggccaaggcaggaggatcacttgagcctgtaagtttgagaccagactgtgcaacataacaaggtcccgtctttacaaaaatataaataaaaaattagccaggcatggtgatgcatgcctgtagtcccagctagtcaggaggctgaggtgggaggattgcaggagcccaggagttcaagtctgcagtgagccgtgacggtgccaccccattctagtccgggcaacagagtgagatcccccctcatgataaataaataggtaaatagtcattatcctaaaccccctaaataacctccccaccatcctggctcctgtggtctgcccaagaacctgtcagactgctccatcattcagcaactaaagggcaaacaactaaccaaaggatcccctcaagaatcctgtttcataaatcaacaagcaagaggaaaatccattaaaaagtgggaaaagaacatgaacagacacttctcaagagaagacatacaagcagccaacaagcatattttaagaaagcacatcattactaatcatcacagaaatgcaaatcagaaccataattagataccatttcacaccagttaaaatggctattaaaagtcaaaaaataaatattgatgagattgtggagaaaagaaaattcttatacattattgatggcaatgtaaattagtacagtctctatggaaaagagtatggagatttttcaaagagttaaaatagaactaccataaatcattctaccaaaaagacacctgtactattatgtgtattgcaacaccattaacaatagcaaagacacggaatcaacccaggtgcccatcaatggtagactgactaaagaaaatgtgatatatatatgtatattatatatatattatatatattttatatatatatatcccagctatatatatatatatttatatatatatatatatatcccagctatatatatcccatatgtatatatgcatgctatggaatactacacagccataaaaaagaataaaatcatgtcctctgcagcaacatggatggagctgaaggccattatcctcagtaaattaatgcaggaacaaaaaccaaataccacatactctcccttatatgtggacactaaacattaggtgcacatagacataaagatgaaaacaatagacactgggggctacttcaggggggacaggagtgatacatgctttgaaaaactttttattgagtactatgcttactatctgggtgatgagatcagtcataccccaaacctcagcatcacacagtataaccatgtaacacacctgcacatgtaccccaccacatttaaaataaaagttgaaatttaaaaagaaagaaaaaagaaaaattaataaatataaaaatctctccacgttaatttaaaaaaaaaaaggaatcctgtttcagcaccatggccagcgtcgcttagtcagtgcctgcactactcttttttgttttttgttttttgtttttgacagtctcgctctgtcacccgggctggagtgcagtgacgagatctcggctcaccgcaacctccacctcagcctcctcagtagctgggactacaggcactcaccaccacacccagctaatttctgtatttttagtacacagggtttcaccatattggtcaggctggttttcaactcctgaccttgtgttccgcctgcctcggcctctcaaagttctgggattacaggcgtgaggcactgctcccagcctcttttttcttttcttttctttcttttcttttcccttttttttttttttttttttaagatggagtcttgctctgttgcccaggctgtagtgcagtggtgtgatctcggctcactgcaacctctgcatcctagattcaagcgattctcctgcctcagcctcccaagtagctgggattacaggtacccaccaccacgccagctaatttttgtatttttagtagagacagggtttcaccatgttggccaggctggtctcgaaatcctgacctgacctgatctgcctgccttggcctcccaaagtgctgggactacaggtgtgagcaaccgcacccagccttctttttctctttaaaaaaaactttatggagatgtggttgacatgtaaaaagctgtgcatatttaatgtatacatctcaataagttggttggatatgtatacacctgtgaaaccatcaccaccatcaaggccacaaacacatccatcacctcccaaagattcctcccaccccctttattattattagtgttaattgttgggggggaggtggtaagaacatttaacataacatacaccctcttagcaaattataaacataaaacacagtattgttagatacaggcattgtgctcttaggtaaatccccagaacttactcatcttgcatacctgaaactttgttccttttacccatcaccttctccttttcccctcctttagccctgcctgcactattctttggaattatctttaatatcatctctgggcacaagtcatgaattgaaacacatatgatcctacaggaatccagtttgagattcctaatttattccaattcccttcattttatagtcggagaaacaaagtccagcacagaggagggtacttaccaaagtcatgaagcaagtcactgacagagccctgacaggagcccaagaccctgagctcccaggccagggcgctgtcttttaaatcaatggctaccaaacctgtggagggatatggtttgttaaaaacagattccttctctaccccactgctgccaaaactatggggtgggacccagcccacgctgtttttaagagctccctagataattctgatgatcagaagatttgcagaacattgttgcaaactgtgccattgtcacgccagcgacacgttagccaccctcatccctatgcgggagaaattttgaaataagaggagaatctctgaacatattattcatataatttttaacagatttttacacagaagacatgcgtgtgtatatgtatgtgtgtggatgtgtgtatgtgtgtgtgttaggatggtaaaacggtttctcccaagcccctgaaatgtgtcttattgctatactaaataaataaaattaaaaaggaaagtttcaaagactgatagtgatggatctgcagagaaatggagatgtcatgttatcagaatgggacaggtcctggtttaaaccctagcgccactgcttagacgatgttgtccttcctcaggcatctcacttaaggttctgcactttacatctccatctataaactatggcaccaactcctaccaggcgaagtaattgtaggttttggaaataaagttgtcagttctggattacgctagcagtggattcatcaggaacaacaggagcctcatcacagagccgggtgaacatgtggcatctgctctgctcacagcgatggcagaagagccttagcagcctgtgtccaagcccagctacaaaagtgagggcatcccaggcccctgtgatccctttgccacctctgacgctcacactgatgaggcccaactcacccgccaacaactgattctgggtttcctttttctttctttttccttttagcagtgatttggagttacctatatatttctactgtcacaccctccatgtaactttagaaccaaccttagtcataaagcattttgcacagtactggcatataggggcagccacaatgaacatgactatggctggaaggtgtggtatgttgattgagaatcccactgtagaccagacagaccaaggtgcagctacacaactgtggatgttatttttaaacaatgtctttgagtcttaaattcactatcagtgaaatgaagacaataatggtagctcctacatcacattattgcaaaagctaaatgagcaaatctaggaaagggcttagcatagtgcctggcatgtaatacatattcaataaatgttgctattggtgatattaccattaatgtcatcattaatttcatcattcaacctcaaatttgagggaggcttgacaatagcttgtaagatttggtgataggactagcagcctaacgatggctaccaaacctaagatagaccccctcaagtctctgagtccaggagaagggtgtttgcactatggcttcaggccacagccagctgaggaaaatagttccagaagaaggcatctctaagtctgaaggcttgctccagaaggactgctggaaagccatcaaccactgtgagccttgttcctggggctcagctgagggatgccaaggaggagttctgggagatcttgagcttctggtggcccacgggtgtctgggaaatctcagatctcccagatctcagatctccaccagtttttatgtacaacgtgtaagttagacaggcaggccatcaacccaggattcgaagacaggcttcatgtttcttgatctaaatgttgactcttccctgaacactccaggatgcagcacagagcccagcaacaaagagacaaacttccagacataacagctgtattcggagtccagctctccagcagcctcagggtgtcattgtaaggatcagacaccattatgtaaagttactatagagtgtaaatcaggataattattattaacatcatcactacatgggctaaagttttcatcacaatactcagtgtgcaaaaatgtaactttctgtaactgaactcaattttttacagttcacatttttgtccgacgcaaaagtgtcatatagttacctccagataaactcattttcttctgggtaaatgcagaagtttcaggattaaaagtgtttcctcctcccccaccttcttcttctggatgggggatctcagatagcccaggtggcggtgggggacagggcaactcctcatctgagtcttggtatcagggaggcgtcaggtccacagtcattctgacatccgtgtctccttcagatccaggagccttctcctggccacttccaaactggcctcaggtgcagaaaacttttgcctgcttcctcctgtctctactttgggggactgtctcaggccctttggtacctagacacacagagcaccgtttgtttgccttgactagggtagaggtgctttggggctccctttaaaggcactataaaggcactcgtttatagccggtcccctgaaatacatgcgggtctctaagcgttcagccaccagctgtcttcaggtctcagcaaggcacagacccatgagcagaacagatgctgtatctgcccttatggggccagcaacagaagacaaataataaaccagtgtgcaaatcaatatacctgggattgcaaatcaagaaagctcaatcgaggtaaagtgggaggaagtggtaaaataaaccagggtggggggcctcttctatagttatcgggaccagggagggctgcagagaaggtgttcgccgcgctggggcctgcagagaggagaagcctctgcgtggagaggagggtgcaggaggaggcagggtggacactcaggtgggaaaacagcctgtgggggaaaggccttaggaggcctgggcctgagctgggcttggaagcaaggtcagcatggctggaacacagtcagtggaaaggcagagccaggcctgaggggcacggccacaagtggagtttatcctgagaaaaatgcaaagtcacagaaacttccattttagggattatttttaattattgaaggattttaaccaaggatgacatatatatttttgccggtaaaaatattctgttagcaacagatctcaacagaggcagtccggccactcccagaagacatgacaaaactgtagggacatttgtggctgtcacaatgctttgagcacactatcagcattggggatgtccagcgatgctaaacatccttcaatggatagtaaagtcctgcacagtgaagactgttcccccccagatgccacaaatgtgtttgtgatgagattcactggggatctagtagctgcttggaaacaaagagtagagggaggctgggcacagtgacatgagcctgtggtctcagccactcaagagcctgaggctggaggatcacttgagcccaggaggtcaaggctgcagtgagctctgatctcccttctgcactctagcttgggggacagagatcctatttaaaaaaaaaaaagagtagtaccacacaagtggtagcagggacagaattaggacagtactggagttttccaggtgggaaaagatgatgctgagatggggctggagcctcagagacagagaacagtgggaaagtaggcagacactgtgagctgagcacacggtgttttgtgttagtgagatgtggtcccagagtcagcagtgctcctggtggccaggagcaattgtctagaggtggcagctaaagagaacctatgtgaaaagcacgtggctcaggcagtcactcagaggtggcataaagagggtttagaaggaagcaatgggaagttcatctggaaaaggaccctgtgggcaagtttttgctgaagggcatggtatctattcaggaatgctccagtgagcttcctgaatataaagacactagctccttcctctatgaggggattccccctagaagcccaccagacttgccacctcccttccttccccacaccccaaactaagcctcacaactgtaatttgagtgttctccacaatgttttaaagcctctgaatacttgcctattactccgaaaattagctgccatacataattaggctaatttggtataatattcatccgaaatgtgaacatgttattaataatgaaagcaaacatatggagcaggtgtccttgctctgtcgagagatggtggctaagtcatgagctctgcccacgaatccttgctgtgcctcccccagtcaagaaggcagcatgactaggaaagaccttgcagagccccaggaccttgtgggagtcctcactggtggttatttactggggccccatactctgaatgtagcgttagcatttattccagtagattctcctcgcttcgggcaaattcaaaaaacaatcccattcagaaaacacttattgtgtctcctctctgcctctcaatcagccttagtctgtatcctcttgtggattgacaaagattgcagaagagaccctagaatgaggacaacccaaggttcatggggtggactgaaatatactaggtgagaaataggaggtgcaaatgattgggaataattagggtctctgcccagctgccctgtcatgttacaaatgtgcccacacctcatgacgcttcctgtgggcctgctgcccttttccacaggtggcatggcactgagctggacacccacatgtacaagtgtccatgtgagcttccagacatcaaggacagtgtttaaaacaagcatacctaaagccacggtattgaaactaggctacggtggggaaacaaaccatgctctctctctctctccctctctctctctctctactccctgattaactcactatagccaatttgaatttggaaattagaatttttttaaaagttttctaagtttttaggtcagtttattctgtctgtcacattaaatcaccagagagaatgtatttgccatagatcagactttcttttcatttaagagcattctcatcaagaaggcttccctaattatgttcaatcataacaacatggaatggggaatccgtgcattaaaaggcagtctcacaatgacacgtggctagtaggaactagagatgtgctgtcagacgtttctgaaccatgctgaaacattagatctgaaattgacccttgccttatccatgccaccataccagactggcttggggaaaattaggtaaatcacttttccattccaaatacatttggagacctgtgactttttagaatcatttatatggttatagcagacactgttgatgggaccaatcccctcagttcgcctgaggtcatgtgaagatgtaatagctggttcccagcttggtgacagcctcctgcctcaagtatttgcacctgtctgcttctctgctgaactttctccagcaccacaagtatttgctccactaagtggggacatatgccagaatttcaggggcagggtaccagggaaaaccctcaaccaacagaggtgggagtcagtgaataaatgcctccacctccccaccttctggtgagacaattctaggtgtgttccatggagtttcttaaagggcctccagccaggtggattcccagtgaccactcatatgcacaaccctcatcagctttctccgtccctgtctcatttccccactccctcacttgtgcttcctgaatttgtctacaagaagatagaatcacatgtcctcgaatctgagtctgcttctgcaggaacccaaaataagatagagacagagatagtttcatagacaaaataatcccccctcaactgataggttttagaacatgatgttgcagtaaactcaggccaagctgctcaccacctgtcatgctgaatacaagaggtgaggtatggggagagggaagtaacttttattccaaatgccagcagctggggagatgtcagggctcaagtcatgaagaaaccatcttcaattgcaggctgggtgaagggtgtaagaagggaaacttagtatgagaaacatgtggggtcctgctgggtaagggcctgcatgtctcgttctgagggctgtcttgggcgtctggaggtctggtcgtcattatcttgactgcagccctagtggtggtgaacacattgttcatgactccccctaagtgggaggatttcataacaggggcccatgcctggtttaagatgagcctctgggagtgttaagtaaccatgcagttagataagcatgcatgggacaagggagtgtctggtgggaaagagagaggaacatgaatttcaaagcacacttcaaggctatatttctaagcttaggaaaaagagttctgaatgcattttgaagatatttggttatagtattttattgtaagcttttggaaatgtatgtgtacttatttttatatgcagatacatgcataaacattttaaataaatgagatcaaattatgcaataaacagaaagatacaccaccaagacccccttacttagcaggaagctttctgtcccagatgctgagagtgctgtggaggtctcctccgagactgcctaccccagagtgcatgcagcccctgagtcggtccccatattgggttcttggcatttggaggagaagctgtaatggggaagaccacgtggaagctgcatcactggccaaactaatgagtctgaaacaataccatattctaagggtaggtggggaggtgggattagtgccacccttaaaggtcttaggaatgcaagggtaatggtccctattatatattcatttaactcactcatatggcccctgaagaactaaatgaattctgaaaaatggctttagactactgaagacataaccaagtagtagcccatttataactgaaataaactcataaataagtatgtgggacatttgtaaaataagcaaaaaaaaagtactaaagagcagaaaagaagacttgaataaatggagagccatactaatgttcctgaaactgaatatttaatcaaaaccccagagactgtaattcttcccatatgaatccatccttttaagggtcttaatcaaatatcaaaagatttattttcagaatatgaaggcagtattccaaaattaactttgaaaaacaaatgaacaataatagtaaaaactacattcaaaaatatattattaataagaagataaatggcaggatgattctattattattatatataatacactgtaaactaaaataatttatacagagataacagaattttttaaatttaaaaatagaatacagagtgacacatccaaaatctcaaagacctctaaaactcaattccttcttaaaagcaatgagaacactgggaaaaaataccaaaataactcttccagaactctaaaaattaactgaagacctgcaaaaatgtgagccatgtttattcaagaacagcaggtgagtcttggtaggtcggtgagctttgtggttctgacttgtcccatatcacccctccctggcccgcagcagccttcaaaaccagaaaccccacaaccatgtttgttcccaaaaccagcagtcttgtagcaactggagagtcccagtttagggagctgcaaaaagccccaaccccagagaactgaccctatttcatctgttgggcagcaccttggaaaagccccatgcacaggtcttgttatcatctcacctgatccagaaactcctcagggaaagtcttcagccagggtgggtgtggaaaatggtaagtgacagttgtttaacctcacagctgcctgagaaagtgatagcagttgcagcatgtaaaagactgtgcagaaaacgtaacaggaagtcttgaaaaagagatgtttacaggggacttcaaacactctgagatattcctgtgaccccacaggtcgtgggcatgagcaaggctctggcccacccaggaaaagacctgagaagccccaatctctcacttctggcggacctcaagttcctgcaccaacaggcagcaaaggctgaagctgagctctaaactgccagagtgctggaggcatcaaaccctgacacagagagagccctcagaaaggtgtagaagattcactggagacatcacacccaacacagaggagagagaaccctcggcgaggtgtagaagactcactggagacatcatacccaacacagaggagagagagcccttggtgaggtgtagaaggctcactggaggcatcacaccccaacacagagacagagagctctcggtgaggtgtagaaggctcaccggaagcatcagaccccaacacagagagagagagagccctcagcaaggtgaagaaggctcactggagatatcacaccccaacacagagacagagagagccctcggtgaggtgtataaggctcattggaggcatcacaccccatcacagaggagagcgagcccttggcaaagtgtagaacactcactggagacatcacaccctgacacagaaagacagagagagagccctcggcaaggtgtagaaggctcactagaggcacgacaccccaacatagagggagagcacctttggcaaggtgcagaaggctcactggaggcatcccaccccaacacagagagtgagagccctcagcgaggtatacaaggcccactggagtcatcacatcccaaaacagacaaagctcttggcaaggtgtggaaggctcactggagtcatcacacccaaacacagagagaaagctctcagtgaggtgtagaaggctcactggacacagagagagagagagagagagccctcagcgaggtatacaaggcccactggagtcatcacatcccaaaacagacaaagctcttggcaaggtgtggaaggctcactggagtcatcacacccaaacacagagagaaagctctcagtgaggtgtagaaggctcactggacacagagagagagagagagagagccctcggcaaggtgtggaaggctcactggttcaagacatccaagggatttgttcaatcatttgctgaccactgagccaaccaagcatagatgtcaatggtttcactgtattttacaagaaacaaggacctcacaaagttagtccagaaaagtcactaaacagcaaatagcaacaacagatcctagggagagggagtgactcgtttccaaagctttcaagttatattattttaaatgtccaatttttaacaaaaacttctgaaagatgctaagaaacaagaaagtatgatacacacacacacacgcacacatgcatacacacatgcacacacacgtgcacacacatgcacacacatgcacacacacatacacacacatgcacacagtcatcagaaactgtttgagggaccccagatgttgtctttactagaaagactgtaatcggcttttacaagtatgtaaagtatgaaaacaatgaacaccaaatggagaatattaataaagagatatacaatacttaaaacactaatggaaactctgaaggtgaaagaaacaatattttttaaaaaaatcaatggagatcaaacagcagattttagtttaaaaaaaagaatcagaaaacttgaagatgcattaattgagattgttcagtcaagaaagagaaaaaagaactatgaaacatgaacagagcttcagagacctgtagggcaccatcgtgcaagccaaataaacatgagtcacaggaggagaggagacaagagaaagaagctaaaatagctttgcaaaaagaatggtcaaaaacctcccatatttggtggaaatcattaagcactgtgaaattcaaaaaactcctaatagaataaattcaaaatgggccaaacccagacacattatagtcaaactggcaaaatatggagtgcagaaataggcaatcagagctggtcatttagtatatagtataagcggcatttcaattcactgaggaaaactgcattgttgttaatacagttgggccatcaggttagtaatttagaaaacctaatatgtatctccctaggttcatctgcatcatcacaaatgacataatttccttctttttaaggctgtatagtattccattgtgtgtatatgccacattttgtttatacattcatccactgttggacacttaggttgattccatacattgactattttgaataacgttgaaatgaaaaaggcagtgcagatatctctcaggcatatccatttcaattcatttggatatgtactcaggagtgggagatacagtgtggatatttgtcttctccaaatctcatgttgaaatgtgatccccaatgttggaggtgggggctggtgggagatgtttggggcgaatccctcatgaacagcttggggccctccccacagtaatgcatgagttctggctctattagttcacatgacctggttgtgtaaaagagtgtggcgcctcccacgctgctccatctcccaccatgtgacacccagctcccctttccctctgccatgactgaaagcttcctgaggttctgagcagaagcagatgctggtgccctgcttgcacagcctgcctagccatgagcctcaggtatttctttataccaatgtgaaacagacgaacacagtatattgctggctcaattatattgttaattttttgaggaaacttcatactattgtccaaaatggccgtaataattgacattcccaccaatggtatgtcagtgtttctttatctccacttcctggccagcacttacctttcatcatctgaatcatagccattctaacaggtgttgaggttacagcacaagttgtaaatctctcactgaggttttcattttcattatgtgatggttagaggggttgagcattttttcatacatttgttggctatttgtgtgctttctcttgagaaatgcctgttcatttcattcgtccattctttcagcaacttatgtgttttcttgctattatttgaatttcttacatatttttgacaatagccccttatcagatgtataattgaaaaatattttcttccaactcatggattgtctctttactctgtagattgtttctttgttatacagaaggaggacataagtgaagtaagccaagcacagaaagacaaatactgtattactgcactcatatattgaatcaaagaaagtcaatctcatagaaacagcaggtagaaacgtggttaccaaggctgggagaagggagaaggaaggggaaaggggagatgtcgatcaaaggggaaaggggagatgtcgatcaaagggtacaaagtttcagttacactgcaggcataagtgtttgtcatctactgcactgcacaatgaccacagttaagactaatgtatatatacagatatatattttttgagacagggtctcactttgtcacccaggctggagtgcagtggcataaacatggctcactgtagcctcaacctcccaggctcaagtgatccttccacttgagccctcacaagtagctggggctacaggcacatgctctaccaacttaatttttttattttttgtacagagtgggtttcaccatgttgcccatgctggtcttgaactcctgagctcaaaggatctgcctgcctcgtcctcccaagttgctgggattacaagcgtgagccactgtgcctggccaatcatgtatattttaaaatcgcaaaaagaatagatttgtgacattctctctacaggaaatatgataagttgttgaggtgatggatatgttgattagcttgttttaatctttacacgatgtatccaaacatcacattgtaccacataaaaaatacaattattgtctgtcaatttaaaaataaataaataagccagttaaataaataaggatataaccaaataatggaattcataaaagttatatgattaatttacagccaccataaagatatgacacatatgtattaaatatattctctgtgccaggtcctattctaacatggcgctaaagatatagcagtaaaaaaaacaaaattcctgccttcttggagcctgtattttaacggagggtgacagacaataaacacataaataattggaatgcataaaatgtcagatggtggcagctgtgatggggaatgataccgcaggaaagaggactgaggagtctgaggagctgaaagaagggagggttgaaatttcatataaggtggttggagaaggctccaatgagaggatgatgtgtgagcaaagacccagtggaggtgatgagctaacaagttatgtcaataactgcagggaaagaatccaaggcagtgctaaggtcttaggtagggtggcagtatgcttggtgtgtttgaggaatgtcaaggaggccaggtggctagagggagtaaggggaacagaagagtgggggccagataggcaggagcttacaggccatgacagggatattggctttcactttattattactatttttttaagacagagtctcaccctgtatcccaagccaaagtgcagtggtgcaatctcagctcactgcaatctccacctcctggactccagcaattctcaggcctcagcctccccagtagctgggactacaggtgtgcgccaccacactcggctaatttttttgtattgtagtagagacagggtttcaccatgttgcccagggtggtctccaactcctgagctcaggcaatccgccccactcagcctcccaaggtgctggaattacaagcatgagccattgcgccaggtggctttcactttaattgagataaagccatgagagagttttgagccaagaagtggcatgatgtgataataaaatgtaaacttcaaaagttgatacatttcaaaaaaaaatctgctggaattatttattttttccaaaataaactttctaaatgatgaaagatttaaatacaaaaaagaaaccataaaagcactagaaaaaaacataagggagtgtatttattgtctgagaaaaaaagacattagttttcacatcaaaactaaaaatgaggaagaaaaatgctgacaaatttgattatgttataaattttaaatttctgaatagcaaaaatcaaaattaaaaaaagagagagctgtaaaatatttacagacgcatagaagccttactacacaaacgtgtttgcaaatcaaaaacaaaaggcattaacagaagagagaataaaatagccaaaaccaaaaattatggtgaatggcacgcacattggaagatataaaattaaaacacaatccaatgctatgtttcatatatcagattatgttttaccttctttaaatctgtcattgtaaacaaagatatggtaactaaagtcaacctgaaaggaagaagctggggtgcaaaataatatttatttatatgagatggaatttcactcttgtcgcctaggctggagtgcaatggcgtgatcttggttcactgcaacctccacctcctgggttcaagcgattctcctgcctcagcctcccgagtagctgggattacaggcacctgccaccacaccaggctgatttttgtatttttagtagagatggggtttcaccaggttggacaggctggtctcaagtcccttacctcaggtgattcacacaccttggcctcccaaaatgctgggattatgggcgtgggtcacagcaccccgccccaaaatagtatttaaagaatttactggagccaacgtgaggacacctgcccgggacacacttcccaggtgccttggggagtgtttggtctgcctctttcacaaggtttttgaagtcaaggggaacagggggtgggctggtacaaagttgtttgacaggagttctcactggtttagagagataacattaattagagattgactctacattgttgacctatagggtatgagttaaggtgtcctcctagggcattttatggctatggggtgtcagttagtttagagcccatagaggaagtggcttcaagagataattacttagctccaggggtgatggctgttgcattttaaattcctctctgggtctaaacatttaaaggggctcacatttctcacataaaatggttttttgttttgttttgtttttttgtttctttctcactaaaggcatccctgaacagcaatttggctggatctgttaatattttaaagtttatcctttggcctagcattcccatctatagctatttcaccccgtagaaacaccaagtgcaaaaatatgccaggctggccagccacagtggctcacgcctgtaatcccagcactttgggaggccgaggcaggcagatcacctggggtcaggagtttgagaccagcctggctaataaggtgaaacactatctctactaaaaatacaaaaattagctgggcttgatggtgggtgcctgtaatctcagcactttgggaagccgaggtgggcagatcacttgaggtcagtagttggagaccagcctggccaatatggtgaaacctcatctctacgaaaacgacaaaaattagcccggcctggtggcacccacttgtaatcccagctattcgggaggctgaggcaggagaatcacttgaacctggggggcggaggttgcagtgagccgagattgcgccactgcactccagcctgggctacagagtgagattatgtctcaaaaaaaaaaaaaaaaaaaaaaagaaaaaaaaaaagcccaggcatggtggtgagcacccatagccccagctcctcagaggaggctgaggttggaggattgcttgagcccaggagtgtgaatcaagctgggcaacatagcaagaccccatctctaaaataaacaaattaattacttaactaattaattaaatatatatccaattggatgtttattgcagtgaagtaatagtaaaacaattagaaaaatctaaatacccatcaacagattttgatcaacttatctgtgaatgatgataatatttaatattagggtacctatatttaaaatcatataaaccttaaatatgttacctcagtgactgtgtcatagaatacaaatataaaagctttttttactaccttttaaactttatgttgaggcctcatctctagaatccagaatatacaaaatgttgctaagagattaaaggcaactgccaaccttaaagaatgaagttcagaagatatgattaagggtggagtttatttgggcacacagcttgaggatgcccgtctgggagacgccgaccccaaatgaatagggagagctggtgtttgtttcacttctaaagccagagacagaaacatcggtgagatcaggacactttccacaggataacagggcagagctggagcaaactgatcagtcacatattgttccattccaaggaagatgactccactccaggaagagggttagtgacctaagggggtcttgacactgttgggttataattatttacgagcagaaaaaagcggaagccgcagctgcattccacgtgactctgctgcatagccatgttcctcacaaggctcagaataaggtaaaattccaataactttaagtttaaattattttaagtttgaattatgtgatatcacaaaaccaaaatacttcaccccaaaatatgtgtcttaggcatattctgagctggctgttcagagggcctgcaaacacaaggagccctgcaaagctgtcttttgtggggcagatttgcacctgcagaggaaataaagggaagtaaacaacagatgtgaaaggctttctccgaagtcctccttgtcaaggtccaggaaagattaactgagaggctgacacctttaaaggtcttgcagagaaacatttaccagaagctgccacccaccccctttgagggctgccacctgagaggctccagctgtgtaccaagactgcctctgctaaccaggcctcttctcctcttctctctctcccgtatcctttttgccatgatccaagcccctattttctgtatattcaagagggctaaaagcatcaaccatcttgacatttgtttgagtctttatattttgtatgactcccaagcccatatgaatgctaataaaatgtttacacctttttcccctggtaatctgtgcattacatttatcttacagactcaaattaccaaaacttcaggaacaaagttaaatgttccttcaaaatataagactaggaaatcagagttgggagagaaattagagttcatctatcctctcacctcctttttcatatggaaatttatgactcagagagggggagtaactttcttaaaatcatgcagcaaaagacaaggtacaagatctcaagttttctgacttccagttaagcattttgctcccagaattttctcagactccagaaaatgataagcccttgcagggctggtcctttgtctcatctcccttttctcctctatgatccacacagtgcaatgcacagagcagagcctcaacgagcaggtgacagaaggaaatttaatcagtggttaaagttaagcacttggctgagcctcaccagtgggtgtgcttggtctgtcagcacacaggacttccccttatggctcctctgccctgatgccatgaaaaacagatcaggtcccataaatcgtgaggagtacatcccctcagcaaggtgactggagtcacacggttcactccttcagagcaaagatcttcccgtctcataaagcaaattccataaggggccttaagaagactttgtatgtaatttgctgaaccttaagcccaacatttgaactattttccatggagacctgtctgttacgcgcctggtgcggagcactgcctggatttcagaaatccaccccggtcctgtgctttctcaccagagcaagacccagcctggaggctccatgactcctgatgccatttttctctctcattctctaagaaacagatcctgaaacaaaaattcatgaataaaaaatgtatctgggcccaggcgcaatggctcacacctgtaatcccagcacttcgggaggccaaggcaggtggattgcttgaggtcaggagttcaagacgagccttaccaaaatggtgaaatcctgcctctactaaaaatacaaaaattagctgggtgtggtggcaggcgcctgtaatctcagaacccaggaggcagaggttgcagtgagctgagatcgcaccactgtaccccagcctgagcaacagagcaagactctgtctcagaaaaaaaaaaaaaagtatctggaaggtgatcccaggaaacacaggtaagggaatagaagagtgagatggggccaggtgcagtggctcatgcctgtaatcccaaagctttgggaggctgaggtgggaggattgcttgagccaagaattcgagaccatcctggacaacatagaaagaccccatctctacaaaaaaaaaattctaaaaaaattagccaggtggtggtgcacacctgtagtcccagctacatgggagatcgaggtggaaggactgcttgagcacaagagtttgtgccaagagctatgattgtgccactgaactccagcctgggaaacagagtgagaccctgtctcttaaaaaaaaaaaaaaagtgaatagaaaggctgggtgtgatggctcacgcctgtactcccagcactttgagaggctgaagtggcagatcacttaagcccaggagttggagacaagcctgggcaacatagtgagattccatctggacagaaaattaaaaaaaaaatagccctgtgtggtggcatgcagctgtagtcccagctgcttgagaggctgaagtgggtggatcacttgagcctggaaaggtcaaggccacagtgagctacagtcatgccactgcactccagcctgggtgacagctagaccctctctcaaaaaatagtcatcataatgaataagaggattgcaggaggtaacagtaaaggatggattatcaagctaattaccaatgtgggcaactggaacttgatccttctgaggcaggaggtgcaacctgactccagaagcgggactaggacgccagaacaaactgaggactgtctgaaacaggaactgcgcagatgtagctttccataagacacgcccactagtgagccgcgtcagtttactgttgccatggcaacactgggacgttacagtccctttccatggcaatgatctgatgaccctgaagttaccaccctcatcctagagatgtctgcatagagatgtcctttaatttgcatataattacaggtgggataaacgtggctgcagaactgtcctgagctgctcctccaggcacacagcctgtggggtggctccgctctgcgaggagcagtccccctgctgctgcacacagccgcttcaagaaaagttgctgtccaacaccaccggctcgccctcaaattctttgctgggagaagccaagaattctcccaggataagctccaatttggggctcacctgccctgcatcacttctgggcatagaacacactctttggagttagctcccatgaggacagaggggctgggacatttgtactgactcaaggcagcctcccatcatgggctgtccatggaggcagggaagattatcttgtttatcagatcttccaacgtgcaacaaaaagatcccggggtagttggaagtctacactacactacactacagtgataagacccagggagggatgagtgaggcacagacattatcttttaaatatattttgtctgtaaagtgatacttaaattttagttaagaggagagactgaatgagaaactattgaaatcttaggacagggctttaaagacttagctcaagtccccacccaagattgtatttgttgcccaaaactgcccacctacccatccattgacttccttgcatctctcaatgcaaagagagacttaaaaactgtttcaggttaatcggaagtaaaatattttggcttagcaaaatcactgtggatggaaattggagcaaccccatgagagcgcgtgcctgagctcagagctgccatgtgcactttattggcgctgggaggaggtaactgaagcggagaggttcctcactgatggtggggaaatcggctttaacagctaaggcaggaattagtcacccggggactatctgggcatgctccgtgaaagaggccatctgtggctgtttatgaggatgtgtttgtgaaaagcgcctggcaggctctgcaagagggttctggcgccacttctgagtttccttttcctccctagcccaccatgccttgtgacaagagcgctctccctggccattgctcagccaaggggtgggcatgaactatcccatgtttcaaggtggcacctccacctctagggctctctcagtcttggcctggaagagctgtcaaaggaaaatggggccctgaaggaaaaggaggagaacctgacaattccgagttaagagcaaggagaaaacaataaatttacaaaccatattagtggttcgtaactcactttgtgacgcctgctttggtccacgtgaagatgagggagaggcatgctcatggggtggctcttagtgctctgaatgggtagaggaaaattgtggccacagggccgcagggcacaggccttggctgatctgattttccaccatcccccattacattgttctgcattgagacactcccttttggagagtggtcatacactcgatttgaaagaaaatcttgatggagaggaggcagtcatgtggttcatgaactgctcaggcagcagcaaatctgggcttccaattccagtacatatttgcctgatgtctgtgtctcagacacctcataaaacattatctgggggtcagggagcggacgaagccagggtgggcagactctggcatccagtgtgactgctggaccctcctatccccagccagacacattttcacagcagcagaaggtcatcaggagataatgaaggaaacaacagaacaaacaaggaaacgtgagaccttgctcctcagagacatggagaagccaccagtctcagagccagggcatgcataattcctacagttcataccagaacagagttagaggcttccgtccaagtcctttccaaaggcaaattaccatgcctctccttgaggcctgtgttcttgtcaagcccaggagccctgcaggatgtgatcccccaaagcaggccacctgccaccatgcacgcccacctccagagtccctgcttttcctagaaaggcatccaggacttctgtacatgaacctcagcctgcctggctcacagcatccctcctctcccctcctatcaacaaggctgttatcaaaataatttttttgtttttgaggctgagtctctctctgttgctcagactggagtacagtggagctatctcggctcactgcaacctccgcctcccgggttcaatctattctcctgcctcaacctcccgagtagctgggactacaggtgcccaccaccatgcctggctaatttttatatttttagtggagatggggttttgccatggtggccaggctggtctcgaatttctggcctcaagtgatctgcccacctcggcctcccaaaatgctgggattacaggcgtgagccaccgtgtctggcccaaaataaatttttaaaaaattttcatcaattatttatttatccttaatttttcaacctttaaaaaattttcaactattttagaatcagggggtacacgtgcaggttgttacatggggatattgtgtgatgccgaggtttgggcttctattgaacctaccacccaaacagtgagcatggtacccaacaggtggtttttcaacctttgccccttgtagtcttctccttcttgtagtccccagtttctatttttgttatctttgtgtccatgtgtagtcagtgtttagctcccacttttaagtgagagcatgtggtatttggttttcgttcctgtgttaatttgctgaggagaatggcttccagctgcatccatgttgctgcaaaagacacaattctattcttttttatggctgtgtagtattccatgttggatatgtaccacatgtaaaacaaattatttttggtctcttgaaatttccctgtattttcctgctctctcctctaattagggtggttgccttcccagatctccacttgtggaaggggagctactccagattcaactcaatggccttctccccagaaagccatgcatacttctcccatgctctcactctgcttggttcatccttgttgcagctttatcagcctttgcctgggctgcacctgctgatgcacatgcaggcctcttccattgggatccacacttccagatgcagggctcattccattcacccatgcctcctcctgaccaggatttggatgttctgtatatttgtatgcacacacacacacacacatacacatataaagtatgtgtaggcactcaataaattcttgttgaatgaacagataaatgaatagacattttcctgagttttctaagacataatattctttaccccccctgaaattggaaacatgacccttaaggctgatggtatttgttgagcaactgctatgtgccggatgctgcggtggtaacttgtacacttgctctctcatgcaaaagctacaactctctcattctaaggctgaatcacactgtggttggcgtgaggtacaatcccaatgccatctatctgctccaggctgtggataggaatagaggtccaattagacttcagttcaagccacctgctgagagaggagcataggcctcccaatatcccctcccattgtttctgagtcctgcaaagacagtctcgtgagccacagacctggtccagctccatcaccaagcagtgtgggcctgattctgcctgccatggccagtcacccccatcaatgcctgtgcaaggtgcaccgcctccgaacatcccaaagctcccagatgtgctggaggtggcacaggatggaagaatcctgtccccggcccatgccactctctcatggcctgcaaataccagcagagtggctttggggcccaactcataaaagctttggctggcttctggtccccacccctataccatgggattcacaccagggccaagggctgggcagggcatgtgagatgctgctccttgtttatccttgtcagcctgttccaaagcaccaacatctcctcccagcctcccagttatgaaacaaaatcccccctgcattcaatgcgtgcagcagatgccataggtgggaggaggggcagcaagggcaaccttggcagcctgagccccagcccacccaccaacatgctctgccaagattcatttacacttgccaagctctgggctatgtactctgccttcattatttcatattaactcttagttaatacagtttaaatatctgtgaagatacctattattgccttcaatttctagattaggaaacccactgcaaggggttaaaaaagttgcctaagtcctcaaaaatagcgtcaggattagagtctgagttcaggcccatctctatccaaagcagtgcttttaataaggtagatttctcatgttagtctttttcttctaattaatctgtaagtttctccccctgctgtttggatatttacacctctcttgttcatggggcttatccctgggctgagtagaaacttgttgaattaggttaaaatcctgaagtcatcctaagctgctaaggaaagttacttttcccagaaacctataacctctcttgggagctccttatctctttcctcaaagcagggaatatgcatgaacaagacatttaattactcctcgtgatcagctcctacattctgtaataattatctttggcgatgttatcttgagtcccctgggtggtatggacattatgaaccattagaggctgttctgaaagctggccatcagtctgattcatattaggccaattacttttactaaaattaaaatttgtcaaggatagcttgatcatgagtcctggcagctaaaaggagccctttaaccagccatgaagcactctttggcagaagcacagtgatttcatctcaagctgaaggtctggttcttagtgaaactaccagagatcaaagggaccaacttccctggatttgtcaccttggacaaaagccctggctcccggtaaccactcccgctggaatcacgcagtcagtcattgcttagttctcttctatggcactcagaggtcctcaatagagacaaagaccagctcatggactcagcaatcatgggttttatggtgtagttggtataacaaatctatgtgttacccacacaacacacattcccatgtttcacttgccaatagaatcccagttttgctaggagcagcaacaggacgtgctaaaaaataattattttcccagccaccttttcaagaaagctggtcatatgacctagacattaaagagacctaaaaggaagtctgcttctagctttctgggaaatttttcttttctgacaacaacaacaacaacaacgacaaaatgcatgtgcttcccgttttcttttgtcttctcccttctgctgcatggagtaagcatgcacttgctgaaagtgcagctgagacaggccggctggctgatttcctattttgacatgggctaatgttaaaggataaaagcccttcactcaaactctggctcatctaaccctcaggcaatcagtacaaaagacctgggaacctattgacagcaaatttctatcagggggctaagggctttcctcaagtactgcgtgtgcagtcagacttaagctccagcctaaagttactctttcctcatcatgatgctaaaattcatgcccagagtggagatttagaatgctaatactacatgcaatgcataaagaaacgtgctgagccactgtgcaagcactggacaaactcctagacacaccctgacataacccttccctataaaagaccctataaggctgaactacacagtctccttgggggccaccgctcttttttcctgtctcacgctggctccccattgcacaaggtaataaactctcctttattgccacgtctttcttgacttctatcctgggaaatggaaaaaacccagggcaccagtctcatctgccaccctgcaaacatgagatgatcaacttaaaaatgaaatctgacctggttaagaatggaagaacggaactgtaaaaagacgctgggtccttggagacacgggagctgttgcacagcgttgtgtggccctcctttgagctaggttgaggaagttaggtttcatgtcacttactgctgaaagtaacaggtacagttgcaaagacaaccaaagaaagatacataatgaccccagctgagcaggagcatgaaacagtgtgatgggtggttctatctaaagaccactcaggtctggtgtggtgggtggttctatctaaagaccactcagggctgtggccgaggatggaaggcaaatgagatcagcatgggctgagaattctctctgcccgcacccttcacagcatgtcttcattctcacgtgtggagcacctgctgtgcttatgtgtcaggcactggctgtgtgatgctataaatataatacgactattacatggttgcttgaaaacatgaatatttgtaggttcggtatttcctaagtacccatgtcccactgccggccatccaggccatgtgagcctccccccaccgagcccctgaagagggctccttgctgcactggccggcacacatcaccacgctgagcatggggcagaaaggtcccgaggagaagggctcacgagatgccacccaagggcattgtatgctgttgctgtaaaggcccagttctcaccttgtgtcacttggcctcatcgtcacattctctggctgacctttctgtaataaatatgtttccgaaattttatgttaagctgatttacattttacatatgctatgatggtttccaattttactattataatcaatcctgagtctaaacttttctgtaaagtgattactttctccatttatctgattgttggaactagataatcgattatcaaatttttatgcaaaatgaaaaaatcagagataatgtcaataaaatatcacggaaaatgcacctgtgatgaagttaccagcatgtccctaaaacctgctctacccacagctgttacttcctagctgatgggaagtcctccttccaggtatgtaggccaaaaggaaaaaagtgctgttctaaacacgcatctttcccttacagccacattcaatcctttaacaaacactgttgctcctgcttccagaatgcacacagaatctgagctcctctcgccacttccctgccacgaccctgctccaagccaccatcatctcttaactgaattattgcatcagcttcctcacggatatcctgttcccacatttacctccccgcagtctatcatccaccacaaggatcccccaggtcactgttgtgctcacaacctccaaaggcccctgcctctctggagcaaaagccaaaaccccacccaaccagtggccaacatgacccacgtgtctctctgcgggctctcccggggctctccctgggctgcctcctgcctggctggctccaccacactggcctccagctgctccttggggcctgtgctctggccactgcctcttcctggaatgctctcccctccggatgtcttcatggttcactgcctctcttcctcacctctgtgttcatgtgtcatattccgggctatgggttggacaggaccagggtgtacatggggaggctggatgggagggccctagtcgcctctgctccccattttcttaaaccagagcagcttcacttttgtgggcctcatatactggagtttcacatacgattttatttgagcaaaggatactaactactgtctcaacagaaagcttgaaaaaccaccagatcgaaaggggcatggcaggtggttgggagtcttgttagatattgttgatgtatttgtgggaaatgataatgtgtggcccaggatagtgggggaaatgaaacagatggccttgggaaacactgttgagggtgaatttaccaagcatgtttattgattggctgtggaaaccaacaagtatctgaggcgggtctcaatcaaatcaaaagttttttttgtcaaggttaagaacatgcctggaagaaaggactacgggatcccagaaacagcctgtagtctgtgcccttctccagagttgactttgagggcttcaatattttaaaagggaaagtgggttggagggaaaagagggagggcatggtcacattactgaatccacatgttgcaagggaaaaggaacaggtggggaaatagtcaatcatgcatccttcctgcactcagtaaatcggcactttacacagacaaggtgaacgcagagtagagatattaatagttagccttttatctgtagctctctgcttaggaagaaaagaaaaggcagcttcttgcatgactcagctttcagctaatttttccttttggcagggtgcattggggtcccgagattttattttcttttcatggttgtgggacaggagaaagaattagggatgctctttgcctctgacatgaatactggatatgtggtgattgttcatgccagatacgcaggtatcttagatgagaaattcatttttattgagtttcgggtgtttgagacagtcccaagaaaactattttcatttcctggctgtcaggaaataaaaatgtttttatttccagtcagtttcagggataaggtgagagacaaggtcagataggaccagggattaagtagtcatcataaataatagtggctgccatttgtcgagggccgggtgtatgataggcgtcgtattaaacacttcctctcataaggaattaaaatgacattataaacataaagagtgtttgttcatgtcgtatttctgttcttctcattcacttaagttagtgaaaagtgggatatgcatgatgaaagagatgcttcatagaaatggtgggcaaaggagctgcggggcctctgggaggaactagaagcagcccccgcacacccttagccccgctttgccatctcttgcccgtcctcctcttgaaagatcctcttcgccctgctctccagctgcaccgcagcctgccctgggcctcacctccttcagtggaatcagcgcgcccaggaagaccgagcccctgttgcccagcagcggtcacctggtgacgaacacacccttttttgtctttctttcctccatgtctcactgtcccactgcctcatcgtacttctctggaggctacctccacccaaattattgtttcagggtctgctttgcgagagaacttaaaataaggcagagaatgtgagggaagtttcttggactgtgcagacagaccagagaaaaacaaagaggccagaaaacagagagcggaggccaagaccttctgcttcccgagggacgcggcgccctccggcgtagcctgaggggcattagcatcttcgcagtcactaaccacggtcatccatctcctgcctccgcgcagctcccacagacagcctgaacggaacctgttaattacgctcccaatcagtccatagatcaaacgtacaaacgagcagcccgttccttccttattattattgccactgccacactcctgcccataatccctggcccacagccaggtctttgtgttgttttgaaaccagcaaaagcaacagcatgaatcttctgttaaaacacacacacacacacacacacacacacacacacacacacacacacacacacaggcactccactaggctatttttatttcctggctgacagtccttttatcatctccagtgggtaagaaattaattgggggcttgaaaatacaatttttctataggtgattactgtaaaccactgggctgccttgcagagaggggactgtttccatctcaggctaggaaaacttggtgcattttttgcattatttctaagacatcatttcccaattacctttgaaatgcttcactggcaaccctccaaaacaagccctctccttgctaacagggtacatgggggagttctccacatcatttagagagccttatatgcacaatctcccctgacacaagcactccctgaaggattagcgagcagccacttggactaataacaattccccaatatcacaggtgaataattaccagctcttcttctctaaaaatggggaaataaaagaagatgggtaggacagaggtacccagaagaagaaagagaggaaacaggactagtttcatttttttaaaagagcattaggttagaatttcaccttcagtttaacctaaaactatctgtatctgtatctctatctctatctctgttctctctatctctctctctgtctctctcaatagatgatagatacagctatattttaatatctccctatttctctcttttttcctatctctctatctttctcagataatgtttccagtttatcttcaatgtgacatttccataaattgacggggctcacagggtttacaacaaaggcatgtaataagccctgcaaatactggggagtcaagattcacacaccttgagtaattggggcaccacagagcagaatatgtaatcaagtacaaaatgttgtgagcacaacaacaattacacaacaagtacaatcaagttgtgagcaggaagtatttctggaaagggagagataaaggagggagaggggataacaatctctggacactagtcttggaagctcccaccctacgcaggctgtgacaggctcctcatgaccccaccagttaaggccttgttgggtaacactcattcctaaaaagctccaccttatcttgaactgaaaactggctcctaaaagccttgtttcttcttccctctgaagcctcggaacactgagtttctttcttattcctcaagatatatgaaggtagttcttccaaactctcaagtctttaatgacctctaattttctgactctaaaaaatcttttttaaagaaaaggatcagattaatgtcactctacatttaattttttaaaaggcattttcaaatgaaagaagccagacatagtttaggatttacgcttgacaaaaccaagcccaactcaagagaactgaaagcagagactcaaacctgtgtttgcacaccggcatttacagcagcattattcattgcaggcaaaaggtggaaacagcccaaattgatggaagaatggataatcagaatgtggtacacgaatacgacagaatattattcacctaaaacaggaatgaaattttgacacatgctacaaaatggatgagcctggaaaacattatactaagtgaaatgtcagacacggaaaaatactgtatcattgcattcacatgacctacctaaatagtctaataaaaaacacagaaaggagtggggtggttgccaggggctggggcaaaggaaataaggagctattgtttaatggcatggacttccagttgggatgatgaaaaggttctatagatgggtaatactggtggttgtacgacaatgtgagtatacttaatgccatagaagtgtacacttaaacaggaaaaatggttcaaatgatacatttctgttgcaaatatttcaccaccaccacagaaaacaagtccaatgtctactcactgacttccccagcccctcccagtaaagttttctgaattacttgcagtcaattcagactataccagatgaagtgtttctgatcatccccttggctctttgtagaagcaaatacccagaatggccatgtcacagctcccatatgttctcccacgtcccctgccacatatggtgacacatggccacggactgcaggcccgaaggttattttcatcatggcagtgttcctctttggcccacatccctaacctgggatcaagttactgtggtctgggtcaaagctggcagcccacaaggttttatagagagatgctggagtattgagatgccagagcaggactgaagttaaaacattacacaggaggccagaggaaaaaaaagggatttgtccaaaatcacagaagagaaatgagattattttcagtcacactcaggagcttgctgatcctgacaataaccctgacgctgtgcttggcaatgccctctcatcgggggcatcgggggctaagcacagaaggcacatgttcctgagtgttgtctgcatcgatgtggttacatgattccagatggaaacaaataatctattctttaataatctgccctcttttaagactggccctacttgatctcctgtccccacttagaagctcacaccccagctgctcaggagaatggcgtgaacccggaaggcggagcttgcagtgaacagagatcgcgccactgcacgccagcctgggtgacagagcaagactccgtctcaaaaaaaaaaaaaaaaaaaagaagctcacaccccaccccagagcagctccatcaggaagaagttatacacttcttgtataacttcctggattataaaatgtggcagctgcctgccgatacagtgcaaatgaatgcaaatcagttgccaaatgaaattggaaaaatcttgcaccttctataagatttgcaaagtcagtgaaagtgacaagggaaatgccttgaatcccacgcaaatcactgacaaatgaggataacgcagagttacggtagttagtgcagaagaaaaaaccacaaagcgatgatttgaccacaggcaagcttcagaagcaaaagaggcctgcaggagctcttggaaaaaatggaaaagtcttcaaacatttggctgaggagatcctcctaggactgtagttacgagttaggcagttgttaataagactttcagaaaaattgatttgttctgtagtacatgattgcaactaaaacaaagattgttttaaacataagataaaataaacaagtgttttttttcaacttatatttgaagttcagggacacatgtgcaggacgtgcaggtttgttacataggcaaatgtgtgccatggtggtttgctacacagatcaccccatccctaggtattaagcccagcatctattagctattcttcctgaggccctccctcccacaagtgtttaatcaaatcttttttattaaacttattatgaaatattgttccattttaaatggattcccttttaaaagaccttttctagtgctgctagcctgacaagtgagcccactgtgtgtgttgtgtacgtgtgtgtgtgcgtgtgtgtttgcacgcttacacatcttcctgtgtgcagcctgcatgcagcagtccccttgccttccagccacataccgtcaagacatgggctgaggttaccggctgcatgttatattgaacaaattagcaaatgaagctggtatccacacagtgccatttctcagtcaccatccccagaagagtattttgtattttatttccaggaatggggcataagttcacaggaatactttcccctcctcccccagtgttccttaaaaaaatcatgctttgtgtttgtaccttgcactttcagctttgctgaagggcttacctggcattatccatttttaccccacaacaaccttgtgagagtttccagcaggaggtatcagccccatcagacaggccgaggtaaagaaaggctctgtccagcagacccagttcctctccaccctcaaggcttctgcctcccagaccaagcacctgtgatcctgccctgtcagtcctgcacttaaactgacagctctgacgctctggggtcagcttgcattacgcctatcacctccatagctcagctccatagtgtgatgctactcagcaacccaacacgttaagatgggggcgcagaaaacctgaacacacagagagaatctaccgtaatgaagagcaggacattatagtggacaacaacaggattaagcaccaaattagaagccagaagtgggaagttcccattccagcctcactcctcactagttgtgtgactgacttcagagagcaggtcattcggccatcctcagcctcagtttccttgcatttgaattgaaaatcatttttaaaaatgtgtatcttatttagttctagaaagggccttagtattaaaatctcagccctgtattgaattatacaagagtatttgaggagcaaatgagctcatggaaatcttttaaattatgaccctaaaaaatgagatgaagggtcattgttatctacaaaagacactaaaaatctcatttatgcccaaataaccaactcttctttaagcaaaagcatatttgagacccaatcattttattagcaatagtaaaaatcaaatgaaaagaaaacctccactgtcatacaaacccagtcaatgcatccttttctttttgtacgtcttctatctcattccctgttcacagttaatctgacttaatttaattataatcgcagcatatattatattgtgatttctgcatttacccatgttgtcatatcacccaccaacaaaaacagaaaaaggcaaaatatgtaaatataatttctcatttccacatctgatgcccaatctctttccatagacaaacatagggtaaaacgtccttggaattgatgtcctataagacggagataaggagaaaggcctggttggctattgaacctctacagctatctcataaaacactttaaaatggcagaaatatttttatccatatcagcccatgtggcagccactagccatgtaagacccgtgagcacttgaatgtggcaggtgcaactgaggaactggacatttaattctatacacttttaatttatttacatttaaatcagcacatgtgggtagcggccactctattggacagcacaggagtgcctggctgagcagagagctggctgagtttcagcaggagatccgagcacagaccaggttcccactcagtgccagggtccctgaggcccaagactctgcacccacccaggcatacttgtcctttgtcactttctggctgcctagtgttcatttccccttctaaaagcagctggatttcatttggtgacctactcttttcatgtcatgtccttgaggcaaacctccccagcatcttgtctctcactgaagagagtaaaaggggactccttactctttgggaatgggtctgtggcccaagccccctacccagatggttcctccaggactttgagtacttagaatccagaatcactcgagttgtcctctgcagtggcagcagtggccacatgttgccagccacatggaggggacgaagatttcccatccttgggcatcttgagcttcccaaacccgtttcttcagcccacattatatgtcccataaatcccttttaacatagattattcagacactgttgtttgcagggtaggaaccctaacaggccccaaagatgagccagggatggttctgatcattctccctgtgtgtcctcaacccagatgtgctccaggaacttcctcactctcatttccattcttcccctggtatagtctgctcacccagaactgatagcatggctgtttaggttttcagcctgaagcacactgaaggcaaatggtgcgacaggtttttctttttgggaaaagtgcgtctccccactttgaatctcagcatgaccaatatctgtctaggggcctgctgttcatggatggatgtgctaattcagagtcagctgagaagcccacctcaacctccaaaagcttttcacctggactccccaccaccccctagcaccagcccataaacatcttatttaagccaaggaaactctatactggaggctggagggatctcttgaagagcttgtacatctgcttgaatgctcaaaggatcagccaggaccaaagtatatacactaccagacgaaagtatcccttcaaaggactcgcactctgctagaggagcacattcccaagactccacttcactcatttcatctgcgcagcagaacccagcaaggcaagccactccgcttttcatatcctgacattctgaaggcaagtgctgattaccaacagcgcaaccgtgaaacagcaccacggggaacactttttaacatatctacctaattagccccttataaagtgtaatgtgatttcttgcctcatcttgtcattagtttcatgagagtctttaagaaatgacagagtcagaagggagaagaaagaggcatgtcacacccaactccatgtgcttcctgaatggcccaactgtccttgaatttagcaaggtgcacatgaagcgcccccgagcttggcacaagggcttgactgctttaacagagctgtgggaagagttcccccaagcaacttacatgctcatgaagataatgcatagaccccaataactgcatgctccattccaaaatagctttggagaaataagcaccgatgtagccataaggaaaattacgttcaagtctcagccaattcatttataaatctgtaccttgggaaagccatacccagtaagtctactcatgggcctacagcatgttgataaggccatgagaagatgaccgtaaaagtgtgtatcacagtcattgctaatatgtattgagcgttttactagatgcaaagcatctttgggatgatttctttataacacagtcaacatggtcaaaaccattcattcattctgattcaaatgtcagggacagtctccctaaaagcaacatattcggagaggtcttgcctcatcccctgatcaaaaattggcctcttctttcattctctcttcttagtccttgaaacagttagagtcatatctcatgttaaggatttggctttttaattcccatctcccccatcagattgtaaactctgcaaggcaaagaccacgtctgttttgttcacccgatttcttaacataaatcctgccatctaaatggtgatgaataaatattaaaatgatgactgcctgctttgtaggcgagagaacttccagaagacccccaccatggcagataaactgtctatatttaaagaagagagctgcagagtgagactccttaaactactgccttttatttcaagcattccatacagtagggacacagccataaagaggacgcactctattgattgaagagtatattagtgggagaattaaattcatgctcctggattatgttaataatattatttcctactaacacatctgattactgtagatttcaatatataatattagtcttcttagaatcaacattaggtatgatgatgttagctataatgactttagctagattcttttattcgcttaacacagattaatcaaatgcctcgtgtgtagcaggcaccatgttggtcccaagtagtatttgcaaaaaaaatgactgaactttattcttagggttttgcggggggggggggggggaggacgggttgggttttttatttttttgttttttttgccttttttttttgagacagagtctcgctctgttgcccaggctggagtgcagtggcatgatctcagctcactgcaacctctgcctcctgggttcaagcaattctctgcctcagcctcctaagtagctgggattacaggcgcccaccaccatgcctggctaatttttgtatttttactagagacagggttttaccatcttggccaggctggtcttgaactcctcaccacatgatctacccgcctcagcctcgcaaagtgctgggattacaggtgtgagccaccgcacctggcctattcttagggttttggataacagtctgaacaccaatatcatataccttataccacctgctcaccatcccattctcactctgttttctttaattttttaatttgttaatttttgtgagtacatagtaggtgtatatatctatagcgtacttgaaatgctttgatacaggcctgcaatgcataataacacatcatgctgaatagggtatccatctcctcaaacatttattctttgtgttacaaagaatccaattatactctttgagttattttaaaacatataattaagtgtaattgattacaagtaccattttatgctaacaaatagtaggtcttattcattcttcctattatttttgtacctattacctgtcctaacctgccccctgccccacctgtcccactactaatcccagcctatggtaaccattcttctactctctatgtccatggagttcaattattttgatcttcagatcccataagtacatgagaagatgtaatgtttgtctttctgtgtctggcttatatcacttaatataatgatcttcatttccacccatgttgttgtaaagaacaggatctcattcatttttatggctgaacagtactccattgtgtaaaagcaccacatttcgtttatctattcatctattgagggacacttgggttgtttcaaaatctttgctactgtgaacagtgctgaaacaaacacgggagtgcagacatctcttcaatatactgatttcctttcttttgggtctatacccagcagtgggatggctgaaccatatggtagctccatatttagctttttgaggaaccttcaaaccactattcatagtggttgggctaacttacattcccaccaacagtgtatgagggttcccttttctccacatttcaccagcatttgtttttgcctgtcttttggatacaatcgattttaacagggatgagatgacatttcattgtagtttttatttgcattgttctgatgatcaatgatgttgagcaccttttcatatgactgtttgccatttgtatgtcttttttgagaaatgtctattcaaatatcttgcctattttttgatcagattattagatttgtttttctctagagttgtttgagctccttatatattctggttattaatcccttgtcacatgggtagtttgcaaatattttttgcccactctgcggggttaccactttattgactgtttcctttgctgtgcagaagctttttaactttttaacttgatgtaatctttcattttattggtgttcttatttacaatcaatgttaatattgataagtaagaacttactcccgccattgtgttaacttgttttctagttgttctgtgatgttctctgccttctttctttccttcctttagtgaaagtgatttttctctagtaatatgatttagtttctagctttttactttttgtgtattcattgtatgtttttatggtttgaggtcactatgaggcttgcaaatactatcttatgacttttttttttccttctgaaacagagtcttgctctgtcatccaagctggagtacagtggtgtgatcttggcttacttcaacctccacattctgggttctcatgcctcagcctcctgagtagctgggattacaggcatgtgccaccatacctggctaatttttgtatttttagtagcgatggggtttcgccatattggccaggctggtctcaaacttctgacctcaagtgatccacccaccttggactctcaaagtgctggcattacaagtgtgagacaccatgactggcttctttatgacctgttactttaagctgataacaacttaacattgtttgcataaacaaagaaacaaagaagcaaaaaaaaaggaaactaataaaaactctacgtcttaactttgtcctgattttaaactttttgttgtttctatttatatcttatagtactgtctatggcttgaaaaattgttatagttattatttttgattggttcatcatttagtttttctacttagaataatagtagtttacacatcacagttacagggatataaaattctgtgtttttctgtgtgcttactattacccatgaattttgtactttcgcatgattacttactaacatccttttctttctgattgaagtactccctttggcatttctcataagacaggtctagtgctgataaaatccctcagcttttgtttgcctgggaaagtctttattttttcttcatgttagaagaatatttttgctggatatactattctagggtaaaagtttctttctttcagcactttaaatgtgttgtgccactctctcctggactttaaggtttccactgaaaagtccactgcaagacatactggagatccattgtatgttatctgtttcttctcccttgttacttttaggatcctttctttacccttgatctttagaatttgattattaaatgccttgaggcagtcttctttggatttaatctgcttggtgttctgttttcttgtacttggatattgatattattatccgggtttcgaaaagtctctgttattatccctttgaataaacattctacccttatctctttctttgtctcccctttaaggccaataactcttagatttgtccttttgaggctattttctagattctttgacatgcttcattattttttattctattttcttttgagtcctctaactgtgtattttgaaatagcctgtcttcaagctaattctttcttctacttgattaattctattattaagactctgatgcattctttagtatgccaattccattttttatctccacagtatctgtttgatcattttgaatgatttcaatctctttgttaaatttatctgatagaattctgaattccttctctgtgttatcttgaatttctttgagtttcctcagagtggctattttgtattctctgtctaaaaggtcacgtatctgtttcttcaggatgggtccctgatgctttatttagttcatttggtgaggtcatttttttcctggaatgtcttgatacttgtaggtgtccatttgtgtctggaattgaagagttaggtatttattgtagcctttgctatctgggcttgtttgtacccgtccttcttgggaaggcttttcacatatttaaaaggccatgggtgttgtgatctaagttgtatctgttttagggggcaccccaagcccagtaacactgcagtttttgcagactcagtggtattgccttgatgatcttggacaagatctgggagaactctctggattatcagagagactcttgttctctttcttactttctcccaaagaaatggagtgtgtctgttctgagccacctaaagctgggatagagtgacataagcacccctgtggccaccatcactgtgactgtgctgagtcagacctgaagccagtgcagctctgagtctcacccaaggccgactgtaaccgctccccgcctagggctcaacaatcagcagacggcaaagccagccaggcctttgtccttcccttcagggcgatgagttacccccagtttccaggctggtccagaggtgctggctgggagcctagctggtgttctattgtactgtggctgagctggcactcggacaacaggatgcagtctttctcactctctcctaccctttccagaggcagggcagccttgccccatggccaccaccccacaggcctatgcggagtactttcagattaccttctatgtcccttgaaggcccccagggctcttcagtcgactgtggcaaatgctgcctggcctgggactcaccctttaagacagtgggctccccctggcccagggcaagtccagaaatgccttccaagagccacatcccagaatcaaagattccaaaagcccccttggtgctctaccaccctgtggctgtgctggtgtctcagatgcaagacgaagtcccttctacattttcctctgcttttctcaggcaaaaggagtctcggccatggccaccacagctgataatgtgctgtctcccctgaagccagtaagtctcagaggctctcagtgtagcagctgggtattactgttaacatgggctacccaaaaggggcaagagaactcaaataatatatcactaaatagtaataatacttatcaatggaaagataaaagattatgtcaaatggaaaaatacacatggtattctgctaatgtgtagaacataaagttctatcaatcccaacactacaaaataatacttatatagctaggtttgtcatagttgaaagcaaccaggccaatttcaacagaaaaacaatttaattgagaatattcggaaattcacgtacatgttcggaggcttagggaaccaaaatgagggacagcataaacactgccccaaatgacacagagaatggtttgacctgccactggccctggacatctccaccatcattgctgcctctgaaaacctttcttgctaaaactgccaattcttccagagagaggaggcccccagagccatgttgttggtggatgggggcttctgagtgacagggcccatgcacatggctgtgccctagtgacaagagaggcagaaaaaatcaggcactgactcatctcttcataaagtggggaagaatgcagacaaggcagagactcagatgtggggtagccaaggagaacaaccagtatggattgcactggcacatggagatgggcgagaatccctggcaagagcagcaatgcttattggactagatgggaacagggaaagtttgaccttatatttctttgttattctgatattgttttgcaataaagccacttaagcaaatggcttaaggaggctgagtgcagtggctcacgcctgtaattccagcactttgtgaggttgaggtggcaggattgtctgaactcaagagttcaagaccagcctgggcaacaaagcaagaacccacctctacacacacacacacacacaaatttaattaactgggtgtggtggtgcatacttgcagtcctggttactcgggaggcttaggtgggaggatcggttgaacccaggaattcaaagctgcagtgagctatgatcacaccatttctctccagcctgggcaatagagcaagaccttatctttttttttttaaggcttaaaataagagaaaataaagaaagacaataaccaaaccccattcaagtgctgcctgcccctgaagcccagcgtgggttggtggcaggcgccctgagcttgaggcctgattgtggagtgcaggcatcagactcagagggcctgggaggctctggagctttcatcagttcacaaacctctgtcacagcctgataacaaagttgtggaaactgcaacaaagaatcagaaaaaatggggaattgggaaatcacagcaaatatttttcccatgctctcaaataacagaaagtttactgaaacagatcactttcatcatgaaaactgcagtgaactagctcaagagacatgcagcagctcacagtgtgtgctttgagtagactttcctggaagaagcagcacctcctagaacacaaattctagcttcatcgtcctgggtcagctttcttgggacccgggggacaaactccattaacttttcctcctggctttgcattgccaaacagaacttctggtcaacctcctttcagtcccagcgacctcacaatgtcaatggcctccaagggtagcagtgcttgttctggcagcttctccatgtggaaatggtctttagaatcctggaaggaaatcattttatgaagcatgcataccgtgagaacacctgacccacagtcctaggctcagtcagaatctaccctctgaaaaaaaatgtttcttctctggagcgtgggtgtaacataagcatctactgaatgccagatagttttatattttttatattttaatttttttagagacagggtatcactctgttgcccaggctagggtgcaatagtgcaatcatagctcaatgcagcctcaacctcctgtgctcaagcgatcctcctgccttagcctcccgagtagctggaattacaggtgtgtacaatcatgcctggctagtttaaacttataaaaaaaaaattaaaaaaaaagatatgaggtttggctatgttgcccaggctggtcttgacctcctgtcctcaagtaatcctctcacctcagcctccaaaagtgctgtgattacaggtgtgagccgccacgcccagccagcaggcagtggtgacatataggagtcagataagaagtgaacaagacagactaggatctccacgaggtggtggctttgtctgactgactgagattgatgcagtaatgatacccaaaggggaaactgatgaagtaaaatgagggggggtgggcagtttcactcaccttgtctccttctggcagccaagagggagaggtgggcagcaccgggaggccgggatggttttgctcagggccctgactgcctgaactgcttctctaaataacctgaggcctctttctgcactcaagggccccatatcctctgatccctgtgttgctgcacccgaatcagcccaggctggggcagcatggattccaggtggagcagctgctgagtccctgctagtttctgagaatagctcacaagagcagaggtgagattctgcagagctttgtgggtctctaagccagtcatccatcttcctgccacctttggagccctccagggatgagcagaacccatgtttcatgaacacataaattactcagtgctccgtaatgcaccctgtaagccacaaaggccacagattaaatcatggcagttgtgaggacagagcctgaggctgtggctggaccagtcttgtgcaagtggccaagtggagaggggtttcaggctcccggtgccagccacagcctcgtccctcttacccaaggcccttacaatcccactgtgtcatttcctttgcacctgttgtcactacaccctctctactgagctgtaggcatcgctacaggggctgtgatgtggcagccgtgtgagcacaacctcgcagcctggaggtggaggaaagaggactggactcagagcctgaggacccggtcccattcccacactctccccagctgcctgtgtgacctgaccctctgtggaccttcatttccttgtctataaatgcaggaagcggggaacataaaggtctgcaacactgaatgccttccatggaggatgcagccccaccaaagggcacttgagctctctctcagtttgtgccgccaaatgacactcttctgtgggtgaaattccgccagcagcccccagctacctcggaagctttccactcctgacgctgatctcaacggaaaccttcctccaaaagcagcattttcagggctggggtgatcactgctgcggcaggggccccaccatgtgacagagaggcccacggtgggcgtggggtctacggagcagttatagctcctgtccctccagccacatctttattctgagttcagcccaaccttttccatgaagtttctataaagttcttctgtcaccaggacagaagtttctgtgtttgacctggggcagatgaatcaggcaggaggactgaggaagacatcagggttctccagccaccttatgggggctcctgtgaaacaggaatggggatcaacatgtccccccacctcctaccctggattgataagggaatcacctctggttgtcacatgtcatacagaggatgcctcctcactgagataccggtggagggtcttgactgccaggttcttggcattttgaacaaagaattggacaaaacgcacagcaaagcgaggaaataatgaggcaacaaaagcagagatctattgaaaatgaaagcacactccacagggtgggagcgggtctaagcagcggctcagtggccttggttacaggatcttctggggtccaaataccctctagaggtttttctttgtccacttggtgtacaccccatgcaaataaagtagtagtctgtcattagtgtgattggttgtggaaaacaaccaatcagaggctgaagtgaagttacaaaggtcacgttctatgtaaacatctgattggttgtggaaagcaaccaagaagctgaagtgaagttacaaagattagactctatgcaaacgtctggttggttgtggaaagcaaccagtcaaaggtacttttaattttccatctgccatgaagaaagtaagtccgcgtggtgacgggggaggaggggaggtgaaaagggagtaacctctggttcttttgttacttaggtgtggaaagttggggttttccttttgatacatatattttttgctttttaataagctttttttagatcaattttagatttacagaaaattacagaactagtgaagagttcccacatactccacacccagtatctcacactgttaatatcttatgttaaaatggcacatttgttacaattagtaaacctatattgatatattattattaactgaagtctacatttttttccaatttccttagtttttaacctaatgtccccttttctgtttcagaatcatttgatttagttctaaaaagtcagcataaatcggccttaggttccctgtctacagcccctattctcctgcctcaattgtggctcaaatacagagaaccaggttcccaggccattcaaaagaaaacaagctagctaggcatggtggcttttgcctttaatactagcactttgggagtctgaggcaggaggatagcttgaggccaggagtttgagaccaacctgggccatgttgcaagacccccatctctacaaaaaattaaaaatattagccaggcatgctacaggtggcatgcacctgtagtcctagctactcagaaggctgaaacaagagaattatttgagcctgggagttcaaggctgcagtgagttataactgcagcactgcacttcagccttggcaacagaataagaccctgttgaaagaaagagagagagcaccaaagagagagagagagggaaagatagaaaaagagagagacagaaagaaagagaaagagagagagataaaaaggaaagaaaagaaagcacactacacgtggtaggatggggcactcacactctaggttggcgtgggctcagactcttatgcagcacagtcatagcagagggatcctgccacgtcccctggagctcctttgtggattttgcaccacctcgcatccattcgcgtttctccctgaagggaggaatttcttagtagctgtctctctacttccctccaccatgctctttagaagggatccagcccacattccaaaaaggagcctggccatctgcatactgaaggggagggcatgtgacccaggctatcccatcacagtgaatcccaggaactgggcagaagcaactagggtcaagagaagttttctctttttttctgaggctaagaccagaatggtggtgctaagactaggagcagatctgtatcataaaaattgtttattttacttatcttccttactctttgtccttttctccctccacagattacttgcacgtactcattttaatagagggcagtcactcataattgattaactgcatagctggactcctgggtgctggtcgcaagagtaatctttgattttctttagaagaacaatgatccttaggtcatgcagacctccttaatggtatctggaagtttgattgactgagggacacgaacagcttcggtcaccaggaatctcacctcctgcatacctcccttacacatcaaagccccagttgtgttcaaagacaagtcagattggagtttgcctctcccaatctcacactttggttgaatcaaataaacctttctctcctcctaagcactggtgtgtcagtgtttggctaactgcgcattgagtacttgagtactggaacctagcgtctgggatcctgcaagactagaacctacgtcttccggctgccagcaacacctcttcctctccatggaaacagatgacttcctgcaattccagactcaacctttggaagacaaagaccaaccctgggtggcccagattccttagtgactttggaaagttagcgcccagcttttagatctggagaccaaggaagatagagcaagctgagagtaacattcattcacacacacacatacacacatgcacacgcacacacacacacacacacaccaggcttgaggaaaagaatcccatgagaaaaataattgcaagacaggcttaatagctaacattgactgagtgcttagtctttgccaggcactctgctcagccattttacatgcattttttttttaattctcaataacccagtgatgggagctattactgtacctgttttacacatgaaaaactgaagctcacagacactgagccctttccccaaagctgcacagctactgaatggtgtggccaggctgtctgactacagaccccacgcatattttttcttttacagaaagaataaatagaaatcatttgttgaaatagcacattatagacaacttcctgagttgcaaattttacccctcttttactcagagatactttaagacttctcttttaaggattttaagttgcttagagtggagcttgttaagctgtacacacacgtgagtcactggggatcttgttaaaatgcagattctgatttgcagatggggatgccctgaattcttggtctctgaggccctctcaggtgggatctctgatggtggtctacacacacatcctaacacaacactcacacacacacgtaccgtagtgccaatactgggagactgaaattctatattttatatgcgcacctaagcttcctcagaaaaagaaagaaatgcaaatacttcatcactaagaatttaaaggagcacattgtggcttccagcgtcagaagcaggaaccattaatctagtggggatgacaggaaatgaaatgtaagaaagctgattagcagcacctttaaaaattagacagctcagctccagaaagggaaataaaagtttggaatctgagctttccctggcataaaagggcagaatagctcttttcaaaatctcgagtgacttttagttgttttgttgttgttgttttctcatcacctccttaaaatcagctcttacactgcctcttgggggtgcagataatccgagcagacttggactgctgccatgaatacacagtctcactcctttgctgctcctcaatattttattttctttcctgtggagaggtcggcgaaggtgaggttgtgctgctggtgattaattgtggtaataaacagggtgagagaaagaactggaaacgcgagaggggttggagatttatctgaaaacatggatcctgggtaaataacgggatgactgtgagatgattacaggctgaattgtgtcctccccaaaagatatgtgcatacctcagtgatattgcgagtttagttccagaccatcaaaatagagtgagtcacgcaaactttttggtttcccagttcatagaaaagtcatgtttacactataccgtagtctattaaatgtgcaatgccattaggtctaaaaagtgtacttaccttaacaaaaaaaatactgctaaaattctgacacagaggaagaaagtaagcatatgcttttggagaaatggcaccgataagacttgctcaatgtggggttgccataacttgtaaaaaacacagtacctgtgaaacccaatacagcaaagcacagtataaggacatctgcctgcggtagagatttcagctcctagggccacagagtgcacctttggttgggaacagggtcattgcagatgtaactagttaggatgaggtcagactagaataaggtgggccctaatccaaaatgactggggttcttataagaagatgaccttgtgccgggcatgggggctcatgtctgtaatcccagcacttagggaagccgaggcaggcagattgcttaagctcaggagttcaagactagcctaggcaatatggtgagaccctgtccctaccaaaaatacaaacattagctgggcatagtggcatgcacctgtaggtccagtgaccagggaggctgaggtgggagaatcacttgagaggaggcagaagttgcagtgagctgagatcgtgccactgcaccctagcctaggcaacagagcaagactctgtctcaaaaacaaacaagcaaaaagaagatggccacgtgaagttggaggcacaggaaggacagccatgagataaagacggcagaaactggagccctgcagctgccagccaaggaacagcacagattccctgcaaactggaagaagccaggaggaggccaggaagcgttccctgcagagttcagattggccacggccctcccaacaccttgatttttgacttctggttttcaggacacaagatgatagatttctcatgttgaagccgtttagtttgtgacactttgttattacagccctagcaagctaataccatgaggttatctttccacctctgacaaactcctaaatccccctcccaggccctcctctacactcacacccctcaccccccaccccccaccaccacagtgattgaccaaaagggaagcaaggaatggggccagtgtgggaggcagtcaagcagagcttctcgcctccagtgaggaggcagtgtagggaagacactgaagagcctcgcaaggccccacctccagtccagctgaggggcctaaggacaggagggtgggaggggtggagggtagaaggggaggaggggaggagagtggaaaggggcaggggggaggggggagggtgcgaggggaggagttggggaaggaaggaggtggggagggtaagaggggaggagggcaggctcaaagatgcttcccgcctgctgtcatcagtgagtcagagcaccagagcctgaaaggggatgggaactgtagggctgagtttgactttgagccagaattgacaccccagggccaagagcctctcaccaggtgcctggagatctaatgaacaaatcaaggaggcccctaagcaatagaaggactggagatttggggatggtgaagctgaggctatagagtcccacagtggacgtgaggggaccctaagggattacccttctctgagttccctgtcctccatgcctttatattcctaaaaaagcactaaaatcctggtatcctctgagccgaaggctcagttttccatcccatccccaagcctcgtggaggccggaactcagctactgttggtttatgcactactcatcagctctcggcatctgtcccacaggctgggcagctccgggacactgcctggcagcaggggctgtgattccagctggagtttaaacacacaccctccaccagtgctctccagcaaacaaggacacccatcctcatactcccacctggagacactcgcacagcaccacaaacattcccacacacacggacacacccattctccaacatgcagagccacacaccctcacacagactcacacatgcagcacagtcacacacactcagcgtgggttcatagagcagccacccttgctcagagacacagacacacgtacacccacagccacgttctccagggcagaaacaggcgtcccctctccctccctctctcagacacatgcaggactcaggaaatccacaaaggccttcacagcagagctgggagattttatacatcaaggtcctcaacttccaaacagaactaattcatgccacaaataaaacagttacagacaaatctgcctagtgtggagttctacttggtgttgggttttgaggagggtcacatggctccttctcttcaggacccccacttctgggaaagcctccaggccatgccctcctcactgggacaggcaggaccctgcctccccatcctctgagcctcagggcaccgaatgtccacatccctcacgaggcgcttaaaaccagagagaaatcccggccctcaccaccacacaccaaagacagacgagagagggaggccgtgagaggggaccccagggcagtcatgattaaatgtgtggacactgccctccccagggttcctggagggcatcacatggggagggaccctgggtgccagctggtgaagaaaagggtgcttccagccgggctccagtatgacattgtctacacttgcattcatcatcacgtgaaggctcagacccctggctacattgccattgcacctagcccaataattattttatgtagaaaattagtgtgtgagccaactatgcatttaaacaaagctccatttgaacaccagatctgttttcctataaataccagtatgcaactgctaaaacaaaatagtaggtcctctgtgccatctagtagcctctgtgatgggaactattagcacaagaaattctaggttggccgcttggtgctaactgtgaaagggtgaaggatgggatctgacatgcgccaagtttccagctgcaaacaccagcacattgtcaaaatgtgttttgtgcttctccatccttccatcactcttcctaatgacaaaaataattaacacgttcatataaaagcacagaatgaatgggagtcctaatttatccacctatttcagggtcatgcctttatcaatatatgacaagttaatgggtcttaattaaaaaagcagcagtaaagcaatttaggaaactgaagggttattatgagtcatcactgtgacagcatgttttgtgcaccatggaagataacagatttgctttccatagtatcacagatccatcatcctgaaactacttgctctcggttgcagagagccattttcttccctttaaaagaagtgcatgagctggtggctgcttccagagtgacagcagcaatgcatgataggaaccaggaaggctatgggaaccagcgtgagggagggggcagcaggcctgaccacaggcaagggtcagggccctgggagaaagcatgagccaacggtcaggacaggaccgcacatcagggtcgttcccaacctgttgctctttcccaccaaaaaactcagtagttttctaaggactgtcaggatcctccccctccaccccgccatggccacacttcctccaggttcctctgagacctttccaggtgggcttcagccttgacctatagagacttgaacaaacactcacattgtttccaatggtgcgaggccgcattccctaagatgacactagtcctcttcatgtgcccgcatgagaaagctcaaggctgctaaaataagttaccatttctttcagccaacacctgaagacagggtctctgcctcccagcctctgtgggggtgggagtctaacttcaacaggaacacattagtaaacccaggtgggtttcacatggaccaccccacttcctgcttttgtagtgtttcacttccctaactctgccaagcccctgctccttccctccctaacccatcattctctcatgttatccttttctcagacagagtcttgctctgttgctcaggttggagtgcaatggtgcagtcataactcactatagccttgaattcctgggatcaggcaatacacccacctcagcctcccaagtaactgggactgcaggtgggtgccaccacacacagctattttttaaaattttttgttgaaacaaggtcttgttctgttgcccaggctggtctttacctcctggcttcaagcaatcctcccacttcactcccaaagtgctgtgattacaggtgtgaggcactgagcctggcccattctcactttaaaatgcccagtgacctccacaaatcaaagttaagttcaatttctgctgggctcttttcccagctgcaatagttgttactgattaaaatctgtccttaccactttagcgttcatctttgttcatctttgacaggactaagaaatctatttcagaaatatttctaaaatccaggtcttctttgtcattattttctggccctcaccatctcgtccctggaatgatgcagaggctgcttcatagccagtccccctactgatagctcatcttgtccatggccatttggatcatgtcctgcctttttaaaacaccctccaattgctccaatttgcaaagcagaaattaaaaactgagcatctgacaaatgtgtactttggctaactgtgcctttgtcatgatgttaaatattttccctaaagatggggtctcactcagttgcccagtctgtagtgcaatggtgcaattacagctcactgcaacctcaacctccctggctcaagccataatcccacctcagcctgccaagtagccgggaccacaggggcactgcaccacacccagctaatatatctatatatatatggttttattaccaacaaaagccctttggaaagctgaggagggaggattgcttcccgtcaggagctcaagaccaccctgggtcttcctatgttgcccaggctggtcttgaactcctgggattacaggtgtgagccactggaattcattataggtggtcttgaattcatttcatgggtaattgaatgattttgcataaaactgtagatttcttgcaagactggcctacagtcctgaatggcagcattgaaacagactgatcccatttaggcagtgtgtgcactcaccaggtggcccagttcccaccactccctgctacccttcactatcctcagttacgaacctgctggccccataggcatcagcgtttgccagccatcacaagtaggagaactgaggctggaaaaatggaaaatgagaccccaggacacagaagggttctaaggaaatgtgaagatgtttcttgctagcaaggaaaacagtctcagggactgagctgaactcacagttcagtgcccacagtgagtgcagtgagaggtgcatctccagagaaaagcaaaggccacaggaaaaaatgcaggctcagggctcctggtgccccgtgttttgtcacagagtaagaagccaagccttcctacaaagaaaggaaacacagcacgtctcctcagaactagcccatctttaaacttgacctagatggcattgctcagggtggccccttggaaatccatgaaagccagaaaagaggccaaggaggaacatggcatctctcactttccctgccgtgctttgagtattgaaatgtctgggcaggaattcctttgaaatgcctgaatcagagagtggatttgcaaaccaagtttctcctttatttttaaagacttttagcctgacttttactttgagagtcagggacacgtggaacataaattccgggtccaagagtcatgtgattcctggccaatgggaaaccacaatggtgcctcccagccctggctcttaacagcaccactgcgcagctgagccagcctcagaaacatgcgttaccctcccagacatgagcctctgtgtgccgcttctcccctctgtcaagtcgtgtcttcttatattaataagaaaaataaaatgaaatagtggtaaagtgttggagtggcgaaaatttttggggatggtatggagagataatgggcgatgtttctcagggctgctttgagtgggattaggggcggcgtgggaacctagagtgggagagattaagttgaaggaagattttgtggtaaggggtgatattgtgggactgttagaagaaacatttgtcatttagaatgattggtgatggcctggatacagttttgtatgaattgaaaaactaaacggaataagagaaggagaaaaacaggtattaaaggtctaagaattgggaggacccaggacatctaattagagactgcctaaggagattcagcatagtcctaccagcaaagattatttatttacttcaagagttaagagtggcagtttggggatagcaccaggaaatatcagctgtgatggcttggagaaacagtgtaaaccggcagtgtaaacaagagcagggcatgtatgagtagttgagaatggtgaataggagtttgactagacagaagatagtagggatgacatgatcagcagggagaccatgtcatgtgtttttatgggaactatgccaagataggtaacagatgaggatgaaatttgggcttgactgaagtaatgggggctgtctgtgaagtcttgcagcagtacagcctaggtaatttgctgagcctaatgggtgtcagggtcagtccaagtgaaagcgaagagaggctgggtatgaagggtgcaaaggaatagtaaagaaagcatgtttgagatccagaacagaataatggattgtagagggaggtattgaggatacgggagtatatgggtttggcaccaaagagtggataggcaaaacaacttggttgacaaggcgcagatcctgaactaacttgtaaggcttgtctggtttttggacaggtaaaatggggaaattgtaaggagagtttataggctttcagcgaagggagataagggtgattaggttttaatgagatggtaaggggtgcatgatcggtcaccaaggagggagtagaggtatcctatacttgtgagttaaggtggggggatacaagaggaagacgcaaaagaggctttggattgggaagaagggtggcaatgaggtgtggctgtagcctaggaatagtcagggaagcagataatttaaagtgtctgggcctaataagggaactgggcaggtggggataactaaaaaggagtgcttaaaagagtactgtctaagttggcaccagagttggggagtttaagaggtttagaagcctggctgtcaatacccacaacagttacggagacaatggaaacaggcccttgaaaagaaggtaacgtggagtgggtagcctccatattgattaagaaggggacggacttaccctccactgtgagagttacctaaagctcggcatccatgatggtctatcgggcttctgaggcgatcgggcatgtcagtcttcagccactaagccgagaagatctgggaagaagtcagtcagacagccttgggccagagttccaggggctctgggagtggctgccaggtgagttgaacagtccgatttccagtggggtcccccacagatgggacatggcttaggaggaatcccgggctgcgggcattccttggcctggtggccagatttctggcacttgtagcaagcttctgggggaggtggtgctggaggaatgcctggccactgcggtttaggcatttggaaattcttgtgtgctggagatgtggctggggtttgtctcatggtggagacaaggaattgcaactcagaaatatgttactacttggctgcctctactctattattgtacaccttgaaggcaaggttaattaaatcctgttgtggggtttgagggctggaatttaatctttgaagttttatttaatgtcgggagcagattgggtaataaaatgtatattgagaataagatggccttttgaccttttagggtctagggctgtaaagcatttcagggttgctgccaaacgagccatgaactgggctggatttttatatttgatgaaaaagagcctaaacgctgtctgatttgggataaagaaaaaggagcattaaccttgactatgcttttagctccatccacctttttaagagtaaattgctgggcaggtgggggagggctagtcaaggaacgaaactgtaagccggactgggtgtgaggaggcgaggtgataaaaggattacagggtggaggagcggaagctgaggaggaattgggacctagctcagcctggagaggaggggagaggtcagatgggtctgtagaaaaggaagattagaaagactcagcgacacttggggttgggactgaggggacaggtgggagggaaagaaggaagatttgggacgagttgcattgggaacagagactagggagggaccaatgtgtaaaagaatgcctggacgtcagcacctcagactgtttgcctattttacgacaagaattatttagatcttgtaggatggaaaaattgaaagtgctgttttccggctattcggaactactgccaagtttgtattgggatcaagcggcattgcagaagaaaataaggcatttaggttttaggtcaggtgtgagttgaagaggttttaagttcttgagaacacaggctaagggagaagaaggaggaatggagggtggaaggttgcccatagtgaaggaagcaaggctagagaaaagagagagtagagacatggagggaaggggttcgggggttcttaccctccagaaaagtgggaaagaggtgggggtgcagaaataaggggttggggtgcagagataagaggtcagggcacagaaataagggatcagggcacagagataagaggtcgggctgtggaaataaggggttcttgcctctcccccagaaaagcgggacttgcctctaagggtgaaggagaaggggttgagaggttcttgcccctctcccagaaaagcgggacttgctgctgacggtgaaggacaagggtttgaggggttcttgcccctcccccagaaaagtgagacttgctgctaacagtgaaggacaagatgttgaggggttcttgcccctcccccagaaaagtgggacttgccattaagggtgaaggagaaggggttgaggggttcttgcccctcccccagaaaagcagagaagaggtagagacatggagagaaggggttggggttcttgcccctcccccagaaaagcaggacttgccactaagggtgaaggaccaaggcaggcgtccctgtgtggtccgacacctctgaaacgtgggtgaataatcagagaggcatccctgcaatgattaacaccaagggaaggctgccttcccaggccgtgaccggcgccggagttttgggtccacagataaaacgtgtctcctttgtctctaccagaaaatgaaacgaattgaaattaagagaagggagagattgaagtgtggcaccaagattgaaaagagaaagaggttgagggatattgagggaggttggagaagagagtaaaaagaggctgctttccagatttgaaattggtgagatgtttcttgggctgcttggtctgaggacctgaggtcgtaggtggatctttctcatggagcaaagagcaggaggacaggggattgatctcccgagggaggtccccctatccgagccacagcaccaaatttcatgcgagtccctgtgaagagaccaccaaacaggctttgtgtgagcaacaaggctgtttatttcacctgggtgcaggcaggctgagtccgaaaagagagttagtgaagggagataggggtggggccattttataggatttgggtaggtaaaggaaaattacagtcaaaggggggttgttctctggcaggcaggagtgggggtcacaacgtgctcagtaggggagctcttgagccaggatgagccaggagaaggaatttcacaagacaatgccatcagttaaggcaggaaccagccatctggatgtgtacgtgcaggtcacaggggatatgatggcctagtttgagctcagaggcctgacaccctcctatgccttgcctggcccctgactgcctagggacctgcagtctatctggtcctctgtaaagctctttttagttccgtgtaaaacagcaggagagtaaaattggggtccagatgaaacagaactattcaggctgatatccaagaagcgccctggctccttaacgtgttttccttttcattggcctcttaggactcaggtttgccaaggctcagaagcaagagccaggagtgaatattgcacataacagcggtgaacctggcctgcttctgagtgtgcaaaagccctttacacaggatttcctgaggtcagcccaagcccaggctcctcaccctcccagaatgcctcagctagctggcaaaacattgtaagtggaagtagagatttgtccagtgtcaaaaatcatttcacacaatagcaagacacaccctgggtggaagtcactgctacagaaactgtgcccttcctccagtcttcatctcggcacatctgtgaccacaaacgctgtctgtctaaattcacatcttgttcaattttagattcatagttttctctactcaaatactttacgcttgtaagacatgttgtgtggaagtgggttaaacttgtcttttaacatcaccaataaccatcttctacatttttttcagtcattaatttgatatcttcactaaaagaaatgccagtaatttgagggttttcagagtaaagtgccttgagctcccccagacagagaagaagcagaggtgtcactgttattattctgagctgataggaaacacatcatggattggaggcaaggaatcagccaccacctgcccggcacgcacatagagcaggtgttggctataattgcctctagacttcctgccatggtcagttgaaagtcaaacctgtaaatgctgcctgactgcaatagaactggagtccacagacatttctgcaacactgcctggtgaaaatatactgactgggtgggatgagatggagggcgcgtatggagcagacacgactggaatagcaaccaacaggctgtcagtcttcactgccttttctcgtcttccattttttttgattctatgaccaaaagagatgacagacctgtaagaaaatggatttggtcatttccggaagaagctttttctttgatctgtctgagagcaggtcagtagaaggtatttttgttaacctggatcctcaccatggatatttcctgagcttctacatggcagttctatgttttaaagttccctttgccgtggcagcacaactgcacaccagacagtcacccttcttcctgagagccactgtgatttcacttcaggctcaaggtgtcctcagcagatctgagggaggactaaaacagatatacacgctttgcttttctgcatcaccaccgttcacagactcccaggagctcctgcagtcagtagaaaggagatcattcaagtggctttcacctagtaccaaacccacacagccttcagacccagcccctccaatctcccgacctcctgggcaccatccctggccaacctggtccagaatggcctccgtcctctagaggccccaggcaccaagatccacaccctctattccagagcattcttggcttcaagttaggtcctatttatcaaacatttgtctagagagcagccccagcacataagtgtgtgtgaaccgcagagtagaggcatggcccctgctcactgtcccctctgactctgggcctgggtaagactgggctccccaaaagcaatataagtgtaccaggaattttctatggtgctcctgggagaagtaggaaggaggagggagacggagaaatcaagtaggggtgtgattcaagccccattcttgcttgcacctgcagcgtgactcccagtgtgagctgaaccttagagcttgtccggacttgaatcaaagcaacgagcctcaggtattggtgtgggtcaagatggggagacataaactccctggagcatcacttccagctttctgcacctgtgaacaaagcccaaaggtgggtcactgaggagagacacaggtatggtattagttgctgaagaacacagatgctgaggagtggtcctgggtgggaggggttgggcggagcaaacaccagcttcacggccaccttcataggccagtctcctgccaggggcacgagacgctccaaggagccagaaatcagagctttcatttcctttgtgactctaccaggtactcacagaagcaggaagggagaggcattgtttaaaaaagcaaacacttatatagcacttactatatgccaggcaatgttccaagcattttataagcactaattcacttagtttctcaatgtctcaatttccttataggtaaagtcaagctaataatattagctacttcacaggcttgcagggaagctaaatagcctatgtaaggttacagagatgatctgccaagagttgaacctgggcagtccagctctgaatctaaatgcttaaccaaaccattaaaatgagtgcaggctcataggaccagacagacacaggtgcaagtcccggtttatgtcaataaaactgcatatcatccacaatggttgaacactcccaccaacagtgcaaaagcgttcctatttctccacagcctcactagcagctattgattcctgactttttaataatcactattctaactggtgtgagatgattcctcaaggatctagaaccagaaataccatttgacccagaaatcccattactgggtatatatacccaaaggattataaatcatgctactatataaacattctactataaagacacatgcacatgtatgtttatagcagcactatttacaatagcaaagacttagaaccaacccaaatgcccatcaatgatagactggataaagaaaatgtggcacatatacaccatggaatactatatagccataaaaatatgagttcatgtcctttgcagggacattggtgaagctgtaagccatcattctcagcaaactaacagagaaaaccaaacaccgcacgttctcactcataagtgggagctgaacaatgagaacacatggacacagggaggggggcatcacacaccagggcctgttgggggtggggggcaaggggaggaagagcattaggacaaatacctaatgcatgcgaggcttaaaacctagataacaggttgataggggcagcaaaccaccatggcacatgtatacttatgtaacaaatctgcatgttctgcacatgtatcccagaacttaaagtaaaataaaataaaaaatttaaaaaactgcatatcatctctgagtcttcactttcctgtttttgaaattggtttttcttaaaaaacaaaaaagccactaatacctgtatctgtgtaagaaatgtccagcaggtgctgaagccttgctgggaactcagtaactctcagggatcattacaaaaatcctcggtaaaattgactgcctgcaatctttgatacagcaatgcctgtccccagtagcttccagtggcagatgtgttatgtgtgtgcatatgaaaaaactaaacatgtaaaaaaacccaaatccaggccacccagtacattcatatggcattacccaggtctacacccctggggacagtcggccatgcctggagacattctaggttgtcactgctgagggaagggtgctgctggcatctcatgcgtagaggccagggatgctggtaaacaccctgcaatggcacaggacagcccattctgtattctttctttccaacataacaataatgataaaagcagctgccaacacacatattcaaggcacaggtctgagtatattataaaggtgatctctaaataacctatctctgagaaacgatctccttttagcccctttacagttagggagaggagacttaaagaggctgagtaattttccaggatcacacagcagacagggaagcttggatttgaatcattgtcatgcagagtccaggacttacactcttcaccattatacattcgttcactaaactttcctaagtttgaccacaaattagaaggcagaaaatgaaaaagcatgtaacttggtagttctagcaactgatttacttccatcaaaggccctttggttctagaaagctttatctatgtgttaacgatagcagtatattaaattatgggctaagtgtggtatcaaattgtaaaataacctatgaaatctaagctttactttttctcatagttattaatggctggggtcagactctcttgggagcccctcaattggaagaaagactgacaagaacacacacacaggacttgaaccaaacccatgtgaattcaaagggaaggcaggtttattatctttcgctccccagagatgaagtcagccagcttttctgttcatcactagggaggatattaaacacaattctttacacgtggggaaaaaaaaataattgattctgagaacagctttggtgaaatgggactttggttggaacagcacacacataacctctccaagacagcaggtcatccgccctggaacctcacccttggtctctggctctgaaactctgatcaccttagggagtgtactggcaatgaccaatagaccaggaccttttgctgcaaatctactaatgttccctaaagggtgacctctggtgctcaaggttgtttcccaccacagggctgcaggctgccactctgcaaagtgaataacttccttagtcaaggctggtggatacatgaaaacctgtcattaaaagaaacacatgctggactggttctcctagaattagccatttggagtctcctcgggaatcattaaggggacattttgcctgactttgaaagcaatctttttttttttttttaacaatagaaaactacaaagtactatacaaaggggactttgggcaccatcagctcctctcaaatcccctatgatgagattattacttagaatagcctaggctattcgacagcaacatattaacgctgaaatctcagtggcttaaaaaatctaaaagttgatttcttgctaatgcatattatgatcctggacaaacaattctgcagggcagtcatcctccatgcagtgcctcaaggacccaggcacctccacacttgtggtgccaccatatcaaaaattggcttccaggtcaccacagcaagaaagcacaaaatttgggacttgtggatcacttcctaaatgctttggcacttctgcttatagcccatcggtcataactagtcatagagcccccccaagtgcaaggaggctgagaaatatatagacggcacatggtaaatatctctatcatcatttatttgtgttacacactctccaattatgctcttttagttctcttacaatgtacagtattgttgactgtagtcaccccgttaatctcccccatatgtagatgaggagcctggtgagtgtggcctattgcaaatattttttcccaccaacccaaaacgtagattcaaaaactaatgctgatttttagagaattttaggtgatacttaatttggtaaaatttattgaaactatacttctcctaatcacattatatcattttctataatcttataactctaacatcaaatttaagataagaaatatatttatgccctatatccataagcaacaagatcattaaatctctttaggcactattgtctagaaaaaagaagaaaaaacctatctaattattttcagcaggaaaaaatttacagagcttacagcccagcattttaccgcttttctttttttgcattggtgaatcattttgagcttataatttcaaagtaaatattttttaaagcctcaggacattcattgtgtaatgatcatttgaaagattttttggttatggtgttctcaaatgaataaaaaggctgttcatagcaacagttatttctatattaaaaagatgaaattgttcattaagtggtacaagtcaatttctttcatcagcctaactgcccattttagcaaagattccatctctgaattaagcaaatagctacacatttcaaagtcaatagctatactatgtttcctttaacgtgaacatctcagacatatcaatgttgtcagcctctttactaagcctttctctgaaaagactgaagaccgtgttttgttgttattgttgtcattgtgtgttttgtacttttgctttttttaaggcaatatttttgtgtgttagctacagtctggccggtcatgacatgcacactcaaaagagagccagatattttttaaaaagtatggtgaggctgagtagcccatttgacaataaatgtaaagtgctcacatttccattggtctgtttggaatttccctaagaagagttatttctttctgtaataaaaccagaagtcgaatgtaataaaccatagctggtctgtgggggtttgtggctaaagtgagtatggaaaagtctgtgaactttctgtttatttccttttcccaaccaaacccttgaaactagaggctggaaggaaggggtagagttgagggccattggactaggtggaggaagtgaccttgcagatcctttcacattctgtaatgcatgcaaaaaataatgagaatgagatagctgaagtttcaattctttagagagagattcaaattcatttgtcggttacaggaagcaaaaaaaatgccattattaatttaggcaattagagaactttgaaagtaatatttagtactttttttaaaaagcctgtcccaggagttcagcccacagcctaggaaagcttaatttttatagtatttcaaatgaagaaaggtcatttcttggatgtgcttgacagaagattgtaattataaactggtaattttaatgagaagtggggtttccataaaaacggaatgaacttttgaggaagtaaaattagagtgcatgttccatccactgtggcatttccaaacaggtcagtgttcccaacattgccacctgctctgccatactttcctgaaaaacgttaatgctttggtacctacatctgcttctcctgccttctcaatgcaccaaacaagacatcagacctttttcttgcatggaggcctgcctcctgcgatgtctgatccacacacttttctcttctctgaatgctaaacagagagaacattgcattgtgatcttcccagatttagggcagagacagggcagtcagtctgggaaggcacttagtggagtgagcccacagtgtggaggggtgagtgcctcctgaggaatcctgccctctctacagtccacgttttctggcagatccaagaggtcacttaaggagttttgaacaacctgtactgtaatgtcctgagggtgcctcagcgtcatctgtgctcatcccattgttatctaaccaaatggagtcactttgcctgtgtgcaatggaaagccaaaaaattgacacactggatttttgcagaaaaacaaaaaaaaattattgccggtcaactggcaacgagacaggaggaaaccctcaaatctgtctccctgagctgggggctgagtggggttttataagcacagggtaataaggtgtgatctgcttggatcttgcaatgaggtgatgctgggaggcataatctcactgatcctgccgcaggacaatgccagggtttgatgtgcttgaatcctggatcctgccatgtggcatccacttttaaatttggtctcactcctcagttcgagcacttggggctgcccatcgtcgcgcacttggctcatctgggcatgctccagcaatgtgaccttcgacctgcaggtccatggcaactgaacaacaactcacaaccttgttacgtggaagctgagccagaccggtctggtgcagttacacatccctacagggtctgattttactgactacgggggagcttgggtattgttttttttaagctcctcagatgattctaacactcagcaggggctgagagccacggagttactttctgagaaggagtaaatatcagcaaagaaagagagacaggaaaggcacttggcagcagcctggtgagtaaggggtcaggcagcaccaagcaaggttggaggatgagcacagtgaggacccacagggcctatcaactgtgttaagataaacaccaaatcctgcggctgggcatggtggctcacacctgtaatcccagcactttgtgaggctgaggcgggaggatcacctgagatcgggaattcgagaccagcctggccagcatggagaaaccccgtctctactaaaaatacaaaattagctgggcgtggtggcacacgcctgtaatctcagctacttcggaggctgaggtagaagaatcgcttgaaccagggaggcggaggttgcggtgagctgagattgcgccattgcactccagcctgggcaacaagagcgaaactccgtctcaaaaaaaaaaaaaaaaaaaccctagaaagccccaggaagtcaaagaagggcgtcagtgcagagcaatgcgccagctcttggttgccgtattcctggtgctacaataaaagtttgttgaccatgtgcactcaggtgggaatcagaggctcaagagaaaagctaaaaccacctggaagctaagccttgtctaaccaaatctattgagtctccctccagctaactgaggggtcagatgccactcatttctgtttgggaacagtcatttgctttaactctcagcctcttgctgcagccatgctgccttcccctcagtgtcctccttcctgccacagtaagtcactctggagtgccacgctccacttaaaaataaacaccttctgtctccatcctggcacagtttcagcttatttagcattctaacatatgtcgtctgttttcccaaacaatctaacatgagcatagcacgatggggttgataatttgggcaaatgagaaacagcctgccatcagcacagacacagtgacatttgatttgctatcggtagattccattgtgttctctcttctcatccttggatgataaacacagaaaaagactgcaagatttccagccctggctctgtggcagagaataaggtctggaggcagggaacctaaggctgcttcaggctgacttcttagaactaagttgaaaggaaaaccttaaccttccatgcctaagtaacaaaaggaccacaggctactccctttgaccttttctccagggcaaatgggaaattggctgttctgcaacaaatcagactgattaccggtcaagtcttcgtttgcaactttgcaacttctctccagcctctgaaaggttactgtccacaacccatcagactgattgcaggccgagtcttcatttgcatagaagtataactttgtagcttcatcctagcctgtgactgctcctttaggaaccaatcagatgtttgcacaggagggtgacctttgtaacttctcttcagcctctggttggctgctttctgcaaccaatcagattgattgtgggctaccacttcacttacctgagatgagcaagaagtggccaatgggaaacttctagggggtatctagacccaagaagattctgtatctgggctcttgagccactgcggctcagtccactcccacactgtggagtgtactttcattttcaataaatccctgctttcgttcttttgttgcttcattctttctttactttgctgggcattttgtccagttcttcgttcaaaacaccaagaacctggacagcttgcagttatgaccctctaccggtgacgtatcttggcaagccagccaggaggaaaggtaggcccaaagtttgggatttatttttctcctttccccttttaaatctttctctcttttccttttcaactcgggaccctctgtggacagtgcctaagcatggagacaactgcaactttctggccagcgccactctggtgaaactgaaaggtttccacatggaagcgccttactgccgccgcccagttcgggtgagggacctgagtccttttcttgttttcatttttctgagtcctgttcctttttccctttttctgagttattttcctttcctcctttttcagtctttcagcagctgtttcctagtggctccttggtaattgagaggaactggccagggccgctctccagtgatctctgaagtccagggagtgaacagggatggctgccctgcctggaagggggaaagacactttactatcctttccagttatcctttcacaactgcatgtgacgcagttggcagcggcagctcgtccagggcaaattcacacacgtttcaggtgacttaaactccttcttttcttatgctaaattcttccctaatcgtactcaactggctaaggaacaaaacggcccacccagcatccagttcttattacagatcatgattattttttataaagctcacagtatgctctggagaggaaaacctgcatgtggcgccccctcctaaggccagagacgtctggaactcttaagattggaccccgcaggaggacgttctttgggttctacggacctcaaactctccaaaggggatgcccttggcagaggttcagaggtctagtattaagtcctccttagaatttcctctcggagttgaaatgctgcttggaccgaaaagtgtctagaatctgaagtttactgtctaatggaaaagtgggatggtattgcataaatacaggtcttataggagttattaagaagttattttaggcagatagagaggaaaaggggtccttgggaagtttttcttttaaagcagctccagaaacctttcttgtctagcaggaaaggcccggctcttagatcccgccgacaagctttgatatccaaatcccggccattagaaactgggtccacccaaacatggtgattcccgctgtcttcttgccattgccccgacttgggcctggaaacatggccacccccacatatccacaggtgtgtaggacaccatggcgccctgtattcgcatattaaaaggttagggtgggagggccaggtttttgcgggccacgtgagtgatatgcctggtcaaaccaatcccctgagccctatgcaaatcaggcaccacctcctccagcctcctcatataagcagccacttttcccaccacacgggttttctctttgttcgaatcccctctccctctgtctctgtacagggaggctgttttcttccttctttcttgcctattaaacactccactccttaaaaccactccacgtgcgtccatgtcgttttatccaatttggtgcaagattaaggaccctggtgtacctccattcattggagacttatcacaggcttttgtgctgccgttctaagcaggggcctggttaacgtgtgatgccttgctttggtactgtttggccccagtgctccttggagtctggggaggtttagcctttaaaattcaaactgccaaggagactgctttatccaaaattttggttcacagccttccttggattatctattggggcaaagtaaaaccggcaagcttgtactgctatctcatggctaaggttccgagctgttggatctttgtttatgtgtgtgtatacatgtctagatgtgtttatacaacaaatgtacacttattgttgtatattgtgtctacaaaattggcttataagtgaaagagcgctcatgaaaactgagtaagtctaagcaattttcaagttcatgtgacttaaagtataactttactaaacgagctagctttaaaattattggtggaataaaaatagaaatgttttcagaattgtcaacatacattttggctgaattttatgtttttctgtgctagatattttaaaatgtcagtgttaattcaagctggaagctgcttagggcaaatctgcctcccattctattcaaagtctcactgagataaatacataactaattgcttcctttggaaaggctaataagaaactcaaaagaatgcaaccctctgtctcccacctgtgattggaaagcccccagcctcctcgcctcgagttgtcccgccttctgggaccaaatcaatgtttgttttacatatgttatttgatgttacatgtctcctttgttaaaagtcaaaattaagtacagtgagtgggataaatgttttaggtaaactttttgtgtaaattaaaatcttagagctatttttaacacccatttgatatctgggccatttccaattgagaaagtgttgtaatatgaggaaatatgtttcaaaaattatggaattcataattccatctatttttcttatctgaaaatgcccatatctgatagttcttatctataaatgcccatatctgatggttcaggatttcttgctttttggagtttcactaaagttttaggttactaaggataaaattctagttaacatgtaattctgtacacaaaatgtgccggaaagggttattttattagaaaaaaaagaataataattttgtctaatccagaagttatctaaaagttagttcaaattacagatttgaaaaagttatttatgaaacaatgtagtaaggactcattaagtaggggagaaaagtgtggaaaaagttaaataataaaatgttctttcaaacctggaaaccttggagacatttggctaattaacactttcatagttaaagcccttagtattaattaaagtaaaataagaagtattgtaaaaatgcattggcagtttgataattcttttttataatatagttaagcatgaaactaaatttagtgtggagccaaatttcacatacatgtttgcgttgtttcacactgtttactgttttgcatggatagtgctagagtacttattggtcatgtgccttaagtggatttcttgattgcacagaatgtgatattggtaaacttaaggatattgaattgtgtatggggaataaaatattcattatgtgggttttttagggcccgggataacactgcagcctccagggtaaactgagtataaaaatttacacctggtttcctgcttatttgttttggcttctagttttcatttctttgctgtttattctcctgtggctttgcttgtatccatatatataaataaatgatgttttccagttcctagtggaaggttttatttagttttgtgatcctatgcacttcttgcaagtcctcattcatttcatttatctggaattcctaagctacctttgttgggcctgcagaaattaacggagcacaccagctttttttttttgtttttttttttgagatggagtctcgctctgtcaccaggctggagtagtgcagtggtgcaatctcggctcactgcaaccttcacttgccaggttcaagcgattctcccacctcagcctcctgagtagctgggattacaggcgtgcgccaccatgcccagctaatttttgtatttttagtagagacagggtttcaccatgttggccagggtggtctcgatctcttgacctcgtgatctgcccgcctcagcttcccaaagtgctgggattacaggcgtgagccaccgcgcccggcccatgccagctttttatcctttaactaactttttgaattttagggttcctgatagtttaagtgtgttgagtatactctcacaaatagaatttgagtcatatttctctctctctaatttctccaaaatctgtaaagtatatgtaaacagtctaattcattgcaatgtattcatttgcatacagtcaagcagggttgccagggttgctcagggagagagaacccagaaacctggcacgccggcaaaagggtaagaatttcttaccagtcagtctctggcctctttctttctgtgcaaactggttaaatataaagtagaagtcactatatatctcctgtgtaaagttctaaattaattggtttaataataataaaagcttaaatcaaacattttgtcagaaaagtgaaaatataatgcgaactttcttagttcatttgacttgagtattctttgggaaataaagacagttttaaaaattattggtgaaatacaattgtcttcaaaatgtaaacgtggtctaaattacgtttgaatactaggtttgctaaacgctttaaggtcataaactgcttctttggcttttgaaaattatttaacttgcctgctttccagctagttaaggcctggggacatgtggagttggccacaccctagctatgctggaaacagtcaaaggttatcagaacataacttaagaggttttacattaaagttaaaattgcttaaagtcaccactgtaacatgcggttaagactactagaaatagttttacatgcaaggtgtgtaaaaacagtagaaagtgttttttcagtttttttttgttttttgttttgtaaaaggttacaaaagatttttacttctttaaaatttctcagtcatcattttggcaaaataaataatttatggtaatctggaattccaaaagcaaactttagttttaaaattgtctttcctaatgcccggctttttggatgaatcagagggcccctgaaaacatccagaaagaaggtatacaggattatttgacttgtttacgcacatgggattgccaaaatgatgttcaatcttctttaggttgtatttttgtgaataatactaatgtatgttccaaaaaaatatatgggatttctaaaattctaatgtctaagtatatgctatcaatgataattatggttattatgttaagttattataaatcatagaaataacttgtcagtgctacgtacctaatttggaaaataaactggtatcaaagaggatataagtctaatgttaattaaacatggactcatgaaaaccaggatgtccaccttgtccttcgtgaatccttaaagcttttgtttctaaaagttatgcattccatgactcatcacggaaaagataaaataatccaaattaaatacattggtgcaatgacttacaaattgtttaaaataatttataaccagtgcttaatcccatattactgggaaaacaattaaagcttcaggtacatttggtcacctgatgggccatttagacattttataaaggggtttcattcaattgttattttcagtgcatgttttctagttgtataaaagctttcccatgcaagaggggtgatgttgtaacagtagattattatgctacagtgtatttttaccgggtaaaaaagctttttatggcttacatcttctagaaacagcaaagaaggactgttcttgccatccacactacaacaaaacttcaggaccttggactttgagttcatagtctcacaattgagaagggtccctccacacttttggagctgtgcacccattggaaccctagaggtaaacctaaccagggaaatttctcccaagaagaagatggcatctttgatgtgaacagctttttcaaattcacagattaagacttctactatcatgaaattcttatctttgaatttttttttcttatggggtgtacttttatttgtgaaggattttgcagccagccttatacatgggtaaccttgtactttaatagataaaatatgaaggcccaatgtaggtaagaaactttaatcatacatgcactgcctcataatcagtcaaaaacaaaacattggtttactcctcttaacccacatcatgggttaaagagaacattgccagaaggccttcacttttctaaaagggcatcctttgttaggtcttttttccatggtttaaagtaaagaagcaaagataagaaatgtaaccctcatgataggttctatagcaaattctactgtaaaggctacagttacacaacagactttaaattctcttgtgaacgttatgctaaataatataattggctaaacaaaaagtacctatgcagctgctggcacttatggcctatggagaaatacatcaaatgaagattatagaaattcagtggtagagaattaatgaagagatcacttagttaggtaagtaaattctttatccagctcattctttgatctatttgatgttaggaggtttggtttatgggaaccttgggtaaggagcatactccaaactcttggtactatcctcccaatagtcataataatagtctccctggtgcattgtattctctcaaaggtttttaatgcttgcatttggccatctccagaatgtcatacagtctctcttcaactggaataacaggaactgaaagaaatgtgcaaccatgaggacaccataacctataaatgatgtgctgagattggaaactcaaaatcatggtaactgagagtgatgctaaggccctaaattttggtcatgctctcacctaagtgaaaaatggggaaatttttaaacaaaattctgggaggccattgttttggactaagctcatgcactaggccacaacaaaccaaactgaacaaaaatggagtcactcatgctgactttaaggaaacacatagattctaaaacagaccaggttttgttttttctcctgcaaatctctatgacaaacatttctgacaaaataggtatcaacctcctgaagttcccattaaatcttttttttttttttttgagatggagtctcactctgttgcccaggctggagtgcaatggtgcaatctccacctcctgggttcaagtgattctcctgcctcagcctcctgagtagctggaattataggtgcccaccaccatgcccagctaatttttgtaattttagtagagatagggtttcaccatgttagtcaggctggtctcaaactcctgacctcaagtgatccacttgcctcagcctcccaaagtgctgggattacaggcatgagccactgcgcccggctgcccattaaatcttttaaccgaatccatttcctctagcatagagaccattgagcttcagatgactgtgcaacaaggtttcagccagttccaggtgaaggcaccacccctggccatcaggaagccaccctgcctccactagacagagtaaggtgagagttccatgatctccaacaggtagggactatgccccaagtcagcatgaagcagttagagaagaaagaccttcagtgcctctgcctcccatgaagacctatggggatcatttctctcagcggggagatgaggcaggagaatagggtctggaggcagggaacctaaggttgtttcacacctgacttcctagaactaatttgaaaggaaaaccctaactttccatgcctaagtaacaaaagtaccagaggctactccctttgacgttttctgcaggacagatgggaaactggctgttctaacaacaaatcagactgattgcgggttaaatattcatttgcaactttgtaacttcactccacaaccaatcagactgactgcaggccgagtcttcgtttgcatggaagtagaactttgtaatttcatcctagcctctgattggttgctttgtgcaaccaatcagatgtttgcacaggagtgtgacctttgtaacttcacttcagcctgtggttcatgctgtccgcatccaatctgagacatgaggtgaacataaagtggccaataggaaacttctagggggtatttggacccaagaagattctgtatccgagcccttgagcccctgcttgggtctgctcccacacagcggagtgtacttttgttttcaataaatccctgcttttgtccttttgttgcttcattctttctttgctttgctgggcgttttaattctttgttcaaaacaccaaggacctagacaacttgcagtcaccaccctctcctggtgacagctcttccagtcaaaatgattgaaacatcatttgcctttaaatatcctattcatttggcaagcatagagtggacgccaaccatgtaagagacacgttggctctggcgtgaaaatgtagaaacggtctctgctagcaaggggcagataggttcatgagcgagaccggattacagagcatagcgagtcagatcacagctggcaggaggaacaagaaggaaactcacaagacaatgcatggccaatcctacactcaaagatgaggcaaagcttcactggtatctcagtccgtgcgtgctgctataaaggaatacctgagactgggtaatttataaagaaaagaggttgatttagctcacagttttgcaggctgtacagaaagcatggcgccaggatctgcttctggggaggactcaggctgcatccactcacagcctgaggggaagaggagctggtgtacgcagaaatcacatggtgagaaaggaagcaagagagaagagggaggcatcaggcttttttttttaatcctctacatttattaattaaaaataatttcaacttttattttagacttagggggtacaagtgtatgttttttaatatggatatttgcatgatgctgaggtttggggtatggatgacagatcactgaagcagactttttaacaacagttctagggggagctaatactgtgagaagtcactcattattgcaggacatcaccaaaccactcatgaggtatccaccccatgactcaaacaccttccattaggtcccacctctaacactgaggatcgaatttcaacatgaggtttgcagggtcaaatattcaaactccagcaaccagaacgaactggaagaagttaccgctgctctcagtcaagcccagaattcctgtcccatgcagactaagcattttcacacagatctttctaagtccttaggtcattagaggagtaacattccctctggctgaaagggagacatcaccaggaggtccctcagccttttgcacaactgattgtccaggagctctgtcctgttctgataggggctgagctgaaccctaaggctcaggattccggggaatagcaccacccagccggacctccccagggaccccagaatctacagtgactcagacccctgtacaacctggagcttgcacatctatttttttcctctcacttatctgttcactgggtcaatcagtccttcaacaaacatttactcagccatcactgctcaccaggcacagaataaaagcaacacacaggaccagagtatgggccttagagacctgcccgtctacagtgcaagtttctaccagggacatgggaacccaggtattgaaaagggccttgtggatgctttatagagatgagagatggaacaactttgcatttccagagggccctgggctgaggccacatctgcagaccttccttgaagtgagcaagcaaagttgcttgccttggcttcatgcctgacgatggcccctctgtggaaggctgcatgcttggactcaaccctgagtcttgggaaccactagaggaagagtaacaggaggtggaacccagggatggccacatgcaacctgtttgtcccacctcatgcctcttcccagctatgggtccattcagtcattcacttattcccataaaaccatacactacatttcttcaaatttcttatgggcctgaagcccccttaatgctcaccaaacatttaatgatttttttttactctctcagaaattaaatatgaacataacgatcgtcactgttaactattgtcctcaagaaagttccacatttctcagatagataaattttacattattaccacaaatgggccatacaatgcttgcaaagtgccaagagaagtctctggtctacaatggtgccagctctctctgcatgttggcactgaggaatgaagaaggagctggaaaatatgcaggagcagacccagacagaagtcaacaggccaggctgattggaggggaatgttggcggtctgaaaaaaaccaattcttcaccccctacttttcttcttcctttctcaatatttagtctccttaaggagcagtaggaggcctaggtgaataaaaccagacatagtgaatgcagtagaaggagacagtctttagtcccaaactagaaagagctgatagacaaggtagcgatctccctttccctggaggaaagcaagcagataacagacaataaacagttgataaagctatagaacaaatttaagcaagagaaggactttaagggagagaaaaaaaaataacattgccaaggcatcaactatcaggaactcagcttggcctttgtatattaccttatttaatacccacaacaatgctaaggaatgtattaccatctgcattcgcctaagaaggagatatagctcagaataagtaacatattccaaagtcacaaactggatgtggttctgactccaaagcccattctcttttcattatggtcactggctccctggaggggcaggaacagtgcacaggagtcatttgtgcattcagcagatgtttgctgagagtgaagctactatgctggtgtgaagatacaaaaatgattaaacccctggattatcacatggaattccaaaattttggaaggcagccttgatgcctagggaactaattgcatagattggaatccataggccggcacccctccttctgttcctgcccatctgccccaagcctgggtggcctacatcagtacaggggcgtccaaagagcaggtgctggctctcctgtgcaattcacctctcccagaagcagtatttcccaaagtgcatttctcagaagagtggggctgtgtgttttagactaagagcgttctctggccccaggtgtttgggaggcctgcaggatgcactcattattagaggatcacagtgcgtgctaaagcaggagagggtctgcccccacccacgctggagctggctcactcattcacgtctcagagggctctgctgctctctacagaacaaaggctttcagcccagcaggtggctcatgcctgtgatcctagcactttgggaggcccaggtgggaggattgcttgaggccaggagtttaagaccagcctgagtaacatagtaagaccccatctctacaaaaattttttgttaaaattagcaaggcatggttgcacacgcctttagtcccagctacccatgagggctgaggtggggggatcacttgagcccagaaggttgaggatgcagttgtctgtgattgaaccactgcactcctgcctggatgacccttgccccagcctggagcaagaccctttctctaaaaagaaaagcaaaagaacaaaggctttcagaatcttttggactgtggcccagagtaaggtatagattttacactgcaactctatacagataccacacacacacatacatacagatgaagccaaagttcagtgaaacaatacttgcctttactatgtgggttgcattctaaccgtttctatttggttttcttgtaatactgagtcatgaccctctaaatcaatttcatggctccacagtttggaaaacactcatctagaatacaagaagtcacttgagctgattgctaaactagccccactctgaatgagagggtcgaaaaactgacatgaaactgtgaaccaggagcctcaaatcccagcgtcactgcttttgggttgtgtgatctgagtcagtggcttctctttcctgagtgaatgtgaaaacctaatggtatcatttagcatggatgcatgctagaaatacactggaaatagacgtcactcaagtggcgttctcaaggaaaatttaacaaagggactgtctgaatcatgtgtgcagggttaaagcaaggaaaaggagagggagcgtttactagaacctggagtgagagctgtgagagaaggtgccccataggacacaggcagagaagaagcttggtggtaaataccctgaccccttttccttcctccctgcaatctcctattaatatttccattaaccaacaccaaccagaagccagagggcagaggggtccattgttgaaatccttacaggtcagcttcctggcaccccagcagaatgaagagtggaaagtggatcaggagggctgaatggagaagagtcctcaccccagtgatgacagcatagtgagggacagtgtttactgtgctgcctcccaacagccaagtgccattcagaaaagtggtgccctcactcctacagcccttacagtttggaagtgtttcccatccattttcttttttaaatttttctcttctttctttctttctctccttccttccttccttctttctgtctttctctctctctttcttctttctctcttttttttttttttttgactgggtctcactttgttgctgaggccagagtacagtggtgcaatcttggccgactgcaacatctgccttccgggttcaagctattctcatgcctcagtctccaaaatagctgggtttacaggtgtgcaccaccacacctggctacaatgatgccattgcactccagtctgcgtgacagagcagccttgtctcaacaaataaataaataaataaataggaagagcctcagggttggcactacaaggtgtagacatggatcaggctgagggtggagagtcctaagggaaggcatgggcccctgacatctggaaactggtctgacactgacagcgagaccatgttctttatgctagacatacctgatctcacagaacacctacatcaagtgaggtcactagacaaaaacaaaatcactgtgcagccctcctaaaaaccaccactcttggtaaaaaatgagtgactgctacttctttaccaattacagccttgtcctcgctctagtctgcccttcctgtctgtaacatttatcaagataccaaactacaacatccttctcgctttctgtcagtacccaatccatggcaaacgtcaccttcttacaccctcctcaacattacccaaccaaagcccagactctaaagctttcatcaatatcttcttcctgagatgccccactacttttctgtggagagcatccttcttcaccatatcaagtaataaacccagctggccaactgcaggtgtgttcctggtggtctgtgactggaagacagtgacattcagaaataagggagttcagaacatgttgcccccagatctgctgctgtagaatattgactattttgagttaaaaacggataagaaaacagcagatgaaagaagaccactctgatctgtttcttaaaagcaaaaaataattcccatgtgaagaaggcactctgtaccagaagcaaagtcccactcccatcaaggatggggaattgagaccaagaaaaatctgcacatacaaaccttgttagactcacccttatcttcctggccacttctccacccaactaaccatgttagcccaagcccctttgccttgtcacattttcataatgcactaccctttgtccaattcactatgtgtttactgtaactgcctttttgggtcttcatttccttaataaggcccccgtgtcacataaaacttgtgtgaaataaatgtgtatgttttcctttcgttcatctgtcttatgtcaatgtaactcgcaggtgcagccaaaaatccctatgagggtagaggtgaagttgtgcctcccctccaacagcaaggatccagggcaggcccatggagggttgggatctggggacgagcagaggcaatagccctgctcttctgggtagtgggggatcccaggaaagccaccgaaggcaaaggtcccaggcctgctctggacaggaaaacagagggcttgcccaaacaccataacaaatagaacaaagaccttgcagagtccagaatttacttcagaaaagtttattttaagcaaaaagaacatgataaaactacagttaaaagaaaaaatccagctgggcatggtggctcacgcctataatcacggcactttaggaggctaagggaggatgactgtttgaggctaggagttcaagaccagactgggcaacatagtaagaccccatctctaaaaaaaatttttttttaattagccagattgctgatctgtagtctcagctacttgggaggctgaagttggaggactgtttgagcctaggaggttgagacttcagtgagccgagattgcaccactgcactccagcctgggtgacagagcaagactgtctaaaaacaacaacaacaacaacaaaaaaaaaaccataaaagaaagaaaaagagagagaaaggaagcaaggaaggaaggaagatgtaaaagaaagaaaaagaaagaaagaaaagaaaaggaaagaaaagaaagaaggaaagagaaagaaagaaagaaagagaaatcgatcgaaagaaagaaacaaaaaagaaagaaagaaatccatctagtagctctgtgttgggggattaaagagacaaatactggtggctgggagcccagtgaggaagctgtggggaggaagtaagtacattgggatgctcagagactaccccaagaccctgcttggaacttggagtctttctctccttcattctctgcaaactcaacgtattcctttgaagcagaagtgaaagaacctaagcagctccagttctcagaattgcttgctgctcccagaatgcagctgcctgtctccttgctcctggccaaaaaacaccgagaggaaggcactggagagcagataattcagctcctcagagaaacactacacacagatgtcagaagagaaaattaacccagagtttgtggactagattctccttcagtcatacaagatgcatgtctaattaatggaaatgactttggagcaatgcctttggtttcatgaggggaaaatatttgagatgaaggatttgtccaaatgtattttcttgatgccgcctccaaagaaccttgaaaaggaaggaaaacaaaatgcaagctaagtgtcagtggtaactgatttgtagcttgcaatgttttattaacaatatctggttcatctgctgttggggagagaaacttttaattctaactggtacctaaccagtcctaagcaggctctctgaataccttacttagcacctatgaaaaatgtctgaagcttgaagtacaaaagactaaatagtaatttggaagtttgctgtgctttagagtgaagccctttcctgtcctgcacagacaaagatgtctgctgggtttcatgaatgttgcatggcacgtgtaattacgctagataatcacacctcacccaagccccacacctgatgatgaacaggctgtggaaggctctgtctccatcctcatgaggaattattcagcacctagactgtattccacttctgtttgggcccataaacatacatattgatcaaaagcttttgcaattctgacaccatctactctaaaacactatcttatttgtgggtaatcagcacctcatgaatattagatttctcccttaatttcgctagcgtggctttctttttggcagggaaaggtcaggactcaatcaggtgaatgttgctaagaaaaaaaaaagcagaacaaattcctgctctgggcaggaggatgctgtgggtcagggatgaacgggcctcctccctgtttttcttccgccctctcctcggttcccagcactcccctgcccccaccaccctgacccagccttcctgtctcatggtccagagatggctgcgtggttaaatggctcatcactgaatagaggtaaagaagtatcaaaggcatgagtacctgtatgtcagaagaactcagaaacagatgatgggcgagttgccgggagatagctgagccttgtactgagatcgtgaatggagatacatcttcctgctcccatctacagctcggaagacccaaccttacatcccagtccagtcctggctcctcaagactccagacccacggagaggtggcgctgatggtgagacagccaggaggatggtttctacagtaataacccacagagtgctcagaactcattccccaaatcagccactttcaaatcagaaactagaaagagggagatggaataaaaaataaaggaaggttgagataatcacacagctggaccctgggaggcagtccatgggctgggcagtatctcagtaaggtttaggatccagggtcacatctgtgaggcctccaccccagccccccaaccttctatccagccagccagcctttaattcatttggctatcactaagtgagcacctacaatgtgccagacatggggctaagcactaaaagtgcaaagacaagctggacagtgtctaaaccttttaaatccattcattcatcacttcttcaggcgtgtactgtctctactaggtaacagatattgctagctgaatttaaggcaaagggccaaacagatgtggtcaccatcctttcataaagcacagtcttcacgggtggacatatgtttattttgtgtttatttgtttgaagatcaattataaattgaataagtactagagaagcaatacactgagttttgtagcaagaaaaacaggaaacaccaaatctagcctggtacctttgtggagcctgctctgaggaggtgagctgaggtgaggagtgagggaccaggtccaggggctgaaagaacattctaggcagcaggggcaaccaggggagaagaccctgacttaggaagcactgaacgcattcaaagtggcactgccatccctacactttgggaggccaaggcgggtggatcacctgaggtcaggagtttgagaccagcctggccaacatggtgaaaccctgtctctactaaaaatacaaaaatgtgctgggcgtagtggtgcgtgcccgtaatccagctactcaggaggctgaggcacaagaaacgcttgaacccgggaggcggaggttgcagtgagctgagatcacgccactgcactccagcctgggcaacaagagtgaaactctttctgcaaaaacaaaacaaaacaggacaaaaagaaacacacaaagtgacactgccagaaggccaggggactgggcagagtaacaagggaaagagagatgaaagatggggtgggaaggcatagggaatgagtaggggctttccttggggtccaaagaccccaccaaggggtccacaaatagaattcggtgagtctgtgaaggtggataaaaagtgattctttctgttttttttttgttttgttttgtttttttgttttgagacagagtctctctctgttgcccaggctggagtgcagtggcgtgatctcggctcactacaagctccgcctcccggattcatgccattctcctgcctcagcctcctgagtagctgggactacaggcatctgcctccacgcctggctaatttttttgtatttttagtagagacggggtttcaccatgtgagccaggatggtctcaatctcctgaccttgtgatctgcccgcctcggccttccaaagtgctgggattactgtgcctggccaaaagttattcttttgtgttcaccaacctcgagctgaaattgagcatgtccctaatagtattattagtacctgggaccttgtcatcaatataagccatagaggcctccatttcacagcacggtttttgcagatatcatgctgtgtcatttatactgatcacaacgttggaattatgatgcttatcagacctgctgctataatgtattactagaaaagcaaatctgttattatattacattttaatgttaataagtatatttcaatataattgattttgttaattctgtgtattttactacatgcatttaaaaaattgttcagaaacggggtccactggctttgcccaaaggcatctatggtacaacagaactaaggacccccagctaaagctccctggaggagcttgcagtctggaggagaaggcaatctggggccagaatgagctgaactatgaatggggcagtgccaggggctctggaagaccaaggaggcaatccttgcgccacctgggatgggtgtcagtcatgtccacaacgatggttagaggcatcttctcagagtgcatcccaccctgccaccagccaaaggcaggcacagcacagggaaggccaccaagtcaggccctgcccagctgctgtgacctggtctgcttcaccccaggaggggtgagagcagccttccccaaccctctgcatcccatcaccatggagaccagggcgcagtctagccagagggaagacagtactctgtccttgttatttacttactcatattctccctccttctcttgttcatttactctctctctcctctctcattcccactttctctcctctttgatttttttctctgcctcttttccccctctctcttcccctcgccaacttcctctcatctctattcacttctgtgtttttcctctgcatttattccacaatccttcacttctaacctgccacagagccccgaagcatgaggaactgggtgggaacccacaaatctgatagtcaaggcttctctctgccctatttttaaggtgggaaaacaggcccggagagtggagaaccacaccctgtctctagatgtgcctagcacatcctagtcctagccctgtgctttggcccctgtgcctggagagggtctcagcatggcacgggcctcaaaggcagagctggaagggccttggcttgcctcctcctggcagccctcagcagtgtctatggggtgggggggtaagcaccctcttcctcatgcagaatccctgccttgcccacagtagagctggttcccaagcagaagagcagcaaactgaatccaaaggcagggacctttggaaggcattctctcctcagtggaaatgagcctctctctctgctccacctgcctccccagcacctgccctgggaaatagaaccccatcatcaggggaatgacaaagaaggaatgacggggtcccttgccaacctgctgagcttggcaaggacctcacagcctcttcttccagaaaagacaatgacagcagggagggggaatgaggtgacactaattcctgtggagcctgcctgggatggggagggccagggctggggggtgacttcccagggtgaagctggtgcccccagcccgaccctccctccctcctctgtgcttctgaagcgttttgcgcactggctcgtcagcactgcagcactatctggtagctgccaatttactttattatgacttgttggagcacgaggcctgggaaagcccaggcacttggtaaatttcagttgaggaaagtgaaactcagtgagctttaacacaaatataaatgactgttgaaacatttctaaagttacagagtgaagggagaaagtggcataattcatatcacacaccaaagcatatgtctaaactgctttctttccctcccaagtcaggagaggagcaacgaaacgggcaaatggaatgtcaaagtgtctccccattcgtggctgccggaaggtggctgagcatgatgggccaatcttcatgagatcacataagtgagtctctggccaggccagagggaagtaacagccaagagccctgatgaattaaaaaaatatatatatatatatataaatatataaatataaatatatataaatataaatatatatatatatatatatatgaagatttgaatgggggcccaaagagaaggggccctaacatgggagagtggaggaacagtgggagggttgaggggccaccaagcaggagcactggggctgcacaaagacctcttccagcactcctcatgatgggatccccctgtctctccaaagccctcagagaaagcgtattttggggtgagccactgtccatgggaagcaggcgaaagcccacagagcacgtgtctgagctgtggctggagtcagaggtggggctgagaggatgcagggcaggcacaggaggtgctggacaagaatgtgtaagttatgagtcaaaatgactggaacactctcctggctcactgcaccacctcctccactgctcatgggttgaatgagatgggatcccccaggagaggccagagcccctggggcccaggtgcagctgaggggaagggggcatccagcaggcttccctgaccagctgtccatctaggcccctggccctgctggcagagctggctgcagcctgatgccagactgggtgaggacattatgctaagtgaggtaagtcaggcacaggaaatactgcatgatctcattgagatgtggagtcgactgaggtgtggagtctgaaaaagaagaagaagaagaggaggaggaggaagaagaggaggaagaaaaaaagaagaggaagaagtagtagaagaagaagaacaagaaggagaaggagagaagaaggaagaaggaagaaacaagaatgaaggaagaaggaagaaacagaatagaagaaaagtggctcccaggggtagggaaggcaaggaaatggtggggagatgtaggttaaagagtgcaaacttgcagttatgtaggatgaataagtctggggatctaatgtacagcaagaggactacacttactaatattgtagagtatattgaaaatttactgaaagagttgattttaggtgctgttagtgtgtacacactcaaggaaactatagaaggagatggatatgttaaattggtcatctgtaaataatcacttcactataaatatgtatatcaaaacatcttgttgtgcatcttaaatttacacaattgaaaaaaaaaaaaggctgccagaccaagactcagggccactgcattccaccagggggtgctgtttgacatctgccaacacctttcacagcctcctccgccaaatatttcagaaaccaatttccaataaagcaaacaccctactcacctggctgcagagttggaaaatatcttgtttcgttgcaaatgagttttaccatctcctcagagctctgaacttagccatcatgcacagtctcttagttgggtcagtgtcccgggatggaatttcctgaccttgtcaccggttcttggatccacaccttagagcaattcattactgttggaactgcctgcatctggttctggcctctcctctcaattaagggagaaacaagacaggagggagggctgcaggaagctgctgtgctgtgagaagcaggtgcccttggatggcttctgcaaactccccaggtcccagttttctcattggtgaagaaaccagaatgggcagaccaatagccttacaggcttgctcagtggctatcctgacaaaacaaaagaccaaaacacaggttaggaggtgttacctaaaatgtacaggaggccattgatttgggcggagttcctggctgtgcatctggcctgcggtcacccagtactccgggctctgacacacaggcggcagctcctccctatgaaagtgccacccaggttggacatgtttttaaaagctgatcgttaatgagctggaaaggaaaggaatagaagccattatgatcactctaagaaagcatctctgattcatggatcatttactattgattattgaaaccaatgccatcgtgcacgccctgtggctggttttaaaacctctatatcgtggagtttgggatttatttggaagcactataataagcagcacatgacaattacttccctcagtattccctgtaatcaagataaattatcctgctattgatgtaaatgggatatgaaaatctatagagtcctcctgaggagaataaaccctacattatgctcacctcatttaacagcaaaaccattttggggtcaatcaaaaatacattcccccaaacttttattgccatccatccttagtcacctccagaaacaattagcaaacaataccagtgaggaagcactcagcctaggggcgcctgtactgctgttattatattcgccttatagagcctccatgtccacagacctagggcatcctttgacactcacaggtgtcttatcataaatgtatttacataggacacatatgtatttaaaatttgttttccccattgctaaacaacctcttatgaaaattcaaagtacgattaattatatatgaatttttttataaacaacaaatggccaggcacagtggctcacacctctaatcccagcactttgagaggctgaggcaggtggatcacctgaggtcaggagtttgagaccagcctggccaacatggtgaaacctcgtctctactaaaaatacaaagattaaccaggcatgatggctcatgcctgtagtcccagctacttgggaggctgaggcaggaagaatcgcttgaacctgggaggtggaggatgcagtgagatgaggttgtgctattgcactccagcctgggtgacagagagagactccatctcaaaaaaataaaaataaaaatatataaactcaatttgcattacttctccttctctgatttttgtctcttcttttccatcaagtgcttgccttttgagccagctttctgtggctgcttttcttctgccagaaaaggtgctgccctgagcagctctgtactctctctttctttgattttctctgtttttcctgtccctgaaaccccatactttattcattcagtggggatgccacagccttctttcctaggaattcctttcagtgcagaacgcttctggcagtctcaacttcttttacgcacctaacctctctttctgaatttgttatttaatatattgtccttttattcagcatctttactataaaaccttcttctttatagcaagacaagcataaaatcctctctaagccatgtcttttcaagctattttatctcagtcttaattctcctaatctcacctgtttaaatgaggagagagaaaaaggaagaggaggaggaggaagatgaagagaaggaggggagaaggaggggagaaggaggagaaagactcacagtgacaatgatttgactatcactggatgttaggattatgagtgatttattttacggtctttattttttcagcattttgcagactgtctgcaatgaacatgtacactttattccagttgccctaaaaagctgagcctacgacaaaagcttacaggctaaagctttgttggaggtgcaatcccaaagaaagaagcaggaatgaggaagaaagaggggcagagaaaaagcaaaaacaaatactgagcagtgcaattccaagccggtcacagtctcacaacaaaacatagctgactgctcagtcacttaggacctcaccagagaggccacaaggagctgtgagccacagtcagccaaggagggtcaggaggcactggctgtctcagcctctcctgggcaaagtctgcactgactccccacactggcagaccacgtggctccacaggaaaagccgggctgcaggggacctgacccagccatgcccaggtgcaccgttcctcctgtcacttagcaccacacgtgggggctcttggtctgcagagctggtggcagcagcggaggcagtcagggctcctggaacacagacagctgagctattgctagagctgctctggctggaggcaaggcaagtctgctgatcaaatgcttttatagctaagaaaataagaatagcttgttttaaaatattagattccattataaagtcttgatccttttagcctcagcttgctgtaggctcattcaaacctttttatatcccagatctacactggacacagtcctttaagacagagtcataaaccacaaagcccacggggccaggccaggaacacgcacaggaaagtgagctgagtggaggctgcggaagtgccggctgggtggaggcggagcgcacacacctctaagtcacgactgcctggcttcggcccacggctgttacaccttttgactttgttccaaaatattttaaaattgaaattcacgacttctctaaacgtgagaaatctcatttttcactgttgacaagtggactttttttccccaatattttgagctaaacaaaacatgtcagctctccacagacagtttttatttgtccacaagcttgtgacgtctgctaataaaaagactatggaaaacacttcattttcccaacctctgcattgcctcacatgatagctcatgttttcatgaaggttccatgtgtaagacactgagtgttacacatggagttcctcatgtcgttttggagcagcactgttacataggtaatattattagtcccattttatagatgagaaaactgagcctctggaagcttaagcatcttgctcaagatcattcggatggtgcatcgctggtgtggactttgcacaccttcaggggccaggcctccgttgacttttccactgaagatgtgcccacacgtgttaacctctctgaaactcacaaccctgtctaattgcaggctgcttggctatcactattccgccgataaggaacttgagactcagggatgtaaagtgaccctccagaggttccaagcgtaagaggggaggcagaattcaaaggcaggcatgtgtgactccaggcccaggaagccccagcctggggatccccagcctgctgaattcacagagcttcagagcggtcctgggtgctggaggcagaacagatggagatgggcccagtactcatgctggagaaagtcctctggacacaacttgccagtctcatgcaggtttccctggggcactcactaaaaacaagattggttcttctgacataccctgaaggtagccactgccaggcagccttccccaacttatttccccagtggcttcatttcccagcttccacacccaccactaacagccttcccctctgagaactagactcactgaaagcgcggactgcgttttaagtggctgtgactccccagggctcattttacctaacaaaggaagagataatctgtgacactgtgatataataagaaatagacatatatacatatattttttaaccccatgcctcttgcttctggcacagagctcttaagacctttgtaatttcctgagccattgactatctaacacagagctcctaaatcccttggaatttcctaggtaacaggagtctctttggttcttatgaagtgactcttggtgggctcctgggtggcctcaggatgggggctggttggcaggggaaccaaccatgtgattagggggttggaagtttcagccccactccttgatttctgggaagaggataggaggtgaaggttgagttgatcaccagtggccagttgatttagtcaatcaggcttttgggctggatgtagtggcacacacttgtaattctagcactttgggaagctgagtggggagggcaggatcccttgagctcaggggtccaagaccagcctggacaacatagtgagacccatgtctctacaaaaaaaatttttaaatagccagatatggtgatgtggtggttctagctactgggaaggccgagcagagggatcaactgcttgagcccagaaggttgaggctgcagtgagccatgactgcaccactgtactccagcctggggcacagagtgagacactgtctcaaaaaaacccccaaattatgcttttgtaatgaagccctccaaaaaatccaaaaagacagtttggaaagcttctggttgctgtatgtgtggaaggtccttgaagggggcactgaagccccctgccctccacacatccttggctgtatgcgacccaccacctggttgttcatctgcattcttcaccatatccattattaatataataaactggtaaatgtaagtgtttccttgagttttgggagccatgctagcaaactgtggaaccccagttaaagccagttgatctaaagtgtaggtgataacctactacctgcaattctcgtccaaagtggggcagtcatgtggcactgagccctcatcctgtgggatctgccctaacttcaagtagatagtggcagaattgacttgtaggacatgcggttgggatccactgaaaaaaagtgtgggaaaagcccacatatttgctgtgaagtttggctgagtggttgtgggaataaagaaaacacaattttattgtcatcatcaaactcatcaattagtaacatttcttagcttttaaaaccctttgaaaggctgataaaagctgttggttctcccctcaaaataagcacttattaaacccagtgctccatctgatttcggagacgtcctgtgccgcctgaagcccatccctgcactgaggttgagaactcctgatgcagtcgtggtccttcttcatcgataagtcacttccggcccacaggcttgtcctcagatcactcatgagtttctggcaggccaaggattcctgcttcctaaagtttatttagagttcatggtagacacagactaaaaacctactcaaactggcctcagaaaaggggaagggagacatagtttcagtgtggaatgatggaaaagctctggaagtggacggtggtgacagctgcatgacaacgtgaatgcacttaaagctactggattgtatgcattaaaatagtaaaagtggtaaattttgtgttgcatatatattaccacaataaaaaaaattcaaaaaggtaaaataaaaggaagagtacattttaggggctggagagtacaccagggaagctgctggctgctggacctcaggaggtaacgagaacattgtcacactaacccctgcccctcccctgtggcttctccctgtccactcttccagcttaggcccacatcacagctctcatgcttttattcccctccagcaagagaaatatttcctcaggctgggaggccacagctcataccaagacacaaactcattggaggaggaatctgattgctccaaattggagctaacaatcctgtcttggcagcaggcaagaatctgttaatataatcatggccaccagagaagtgccatcacagggggaggcagaagaaagcagtgtggatgcacatcacagaaacgaagccatgagacgcaccagaaggctacacgcagagcagcacagatagagctgaaccgtctattaccgagtagaaagaggaagaaacagaagatctaggtgggagcttctccagcttgaatcacagaggaaatcactaagggaccctcttaaaatgcagggactgcttccacagatcagaagcagggcctaggactctgcatttctaacaagctccaggcgaggctgctggggcacacaccacactttgagtagccaggctttagagcccaagctcagcttttgtgtaaatcaaaaatgcatgccggaagcagctctacctagtttacaaggatgcatgcattctccagcacattaccaaacacaagatgagaagcagggaagaggtgagggtgtggaagtgcaatgagaatacgggaaagagaaatctacaaaatgggagagggatcttgccccatcggccagtgagagcacgctgagagctgagggtgtgattaacgtgactcgtacccacagtccacagaaggagaaggaagggctctcatgcgatggagcaacttcctggaccctgctggcttggcaggtttcctgggccagccccaccggcttccttaagggacatttgaaatggtgacttagctttcacctataagcagatggcttggtgagggtggtgagatttaaaatccactgcccctgaacttcccacacacttcccacacacaactgcattcaatgtgtctttccaggatatagaaaaaatatttgcttagatttatgttaaccatttgatttgcatgcacaacgcaaaaaaaaaaaatcaacatcagtaatcaaggaggctaatatgcaaatgtatcaaatcatcatccccagaattttctaataaacaaaaggctgaggagcaacagccagtgacgctggcagagctgcaggcgggccacagcgaggggagagggagagccccacagcacagctcacgtggcacagagcacatcactaaatggaaatggtgtgatccatttcacctgcccccaaaacacatgctgctatggctcagctgtgtccacacccaaatctcaccttgagttctcataatccccacatgtcaagggtggggccaggtggagataattgaatcctgagggcagtttcccccatgctgttctcaggatggtgagtgagttttcacgcgatcttatggctttttttttttttataaggggctcttctccctttgcttggcacttcttcctgccaccttgtgaagaaggtgcctgcttctccttcaccttctaccatgattgtaagtttcctgaggcctccccagccatggtgaactgtaagtcaattaaacctctttcccttataaattacccagtctcaggcagttcttttctttatagcagtatgtaaatagactaatacacatgctatccaatagattaaagagactgaaacacaagtgtgtccccaagacaggaagagctgggaaaataaaatacctgacatgtggcatggtgccaagcggaggtcccatggtctgctttccctcaaaaactttattccatctctgtttctccactttcaccctattacctggagagtggaaaaaatgctccttcaaacaaatcactcaaaccaaggaacaagttttagctcatggagtctcactgatattgaaatatgggcctatagtttgaattgcttacaacacactgattaactcaggactaaaatgattcatcatactgttggtgaacttagcagcttagcttctgtgtgtagtaactagattggcacttactgagcacctgctgtatgctgggcagtgtactaggcactgcaactgaggaaaaaaagtattttttttttgagacagagtctcactctgtcacccaggctggagtgcagtggcgtgatctcagctcactggaaactctgcctccggttcatagctgggactacaggtgtgtgccaccacgcctggataattttttgtatttttagtagagatggagttacaccgtgttagccaggatggtctcaatctcctgaccttgtgattcacctgcctcggcctcccaaagtgctgggattacaggcgtgagccaccgcacccagccggaaaaaaaagttttaaagcctggacaacatggcaaaacctcatctctacaaaatatacaaaaatcagccagatggggtggtgcacgtgcctctggtcccagctactcaggagactgaggtaggaggatcgtttgagcatgggaggtcgaggctgcagtgagcgatgatcacgccactgcactccagcctgcatgacagaccttgtctcacaaaaactaaacaaaaacataaacaacacggtcttagatgtgggcattgtctatcatgtgccacccacctatctatctagagagacaagactaacatatacagaatagattagagcaacaaattgtgttcctatacgtccagtggatggacttcatgcttcaggcatggctggatccagggatgcaaacaatgtcaccaagacactgccgcccaccccctgctccctcagagaagcttcctaggcttgaagctgtcatagaaggaagcagccaggaaggagaagcaaaaagaagcgctggcaggccccggctggaagatagtgagatgggggagaaaacacagagcccttctttctcttgtgtctccatcagtccctacatcaattctgcttggctctctgggtcacctgctcctcctgcacacactaagcactgggcaagactatggcactctggttggtctttctgaatcctggacccttcccagaaggggaagggagctgcctaatggtcaggttcaacaaagtcacatggaggggcagagcacaaaggtcactagagaagaatctgctgggcagacaagcaacacaatatgattgagaatgcaacaatatcacactggagacatcaccatgggttgaaataaattaggcgagagtggagcgtttctaaaaatgcttgctgtagactgaatgtttctgtctccccaaaattcataggttgaaacctaatccccactgtgatggaagcaagaggtggaaactttgagaggtgatgaggtcatggggcagagcccttatgattgggatcagtgcccttatacacaaggccctgggagagcttcctcgtcctgttctgccacgtgaggacacagcaagaagccgccatctgtgaagcaggaagcagccctcacagacaccaaatctgccggccccttgaccttggagtttccagcttccagaactgcgagaaataaatgtctgtggtttgtaggtcacccagtctgtgggatttcataatagcagcccaagtggactaagagagtggtaaaattaaacacagcaattacacacatttggggtctcccatatgacaggcaagtattctttgttatcaaaatccaaaatccaagactcaagggctgcaggagccatctctgcccatcccccacgttcatcttttggcatctgtccccctcctcccatggggcttacttctatttttattatttctggctcttacctcagggcccttgcacttgctgttccacttgccaggaattctcttccctgcttgtcttaaaactgattcttctcatccttcagtgtccataagaagtgtggcttccttagggagtgtttctccttccacccttgatgagctggttgcccccctccctcactcactactgagtccccagggtggggaacgcatctgtactgaccattactgcaccccattgcatagtcctaatgcacagtagaaacttgataaatgtttccttccttcattcaacaaatatttactgagcactgacggtgtgccaggcatgacaacaagtgtttaaaatacatcagtgctcaaaacagccaagatcctctactctcaaaaagtgtaaatatttttttcaaatcaatgaccgagcccgctgaccagaaccccagacactgagtagctaagcagaaagcagctgcaagggcaatgcaggtgaagggaagaacaagccgatggcccagaaggcaggatgagaatccgagatccactctccatgatctgccatgagttccaccagaggcctggccatgccttggtttcccccagcccacagcctgcaaatagctcctcgaaacccttggggtgttatggcccctgctcatcctcctgagggcacaggcagcgaactgagaacccctgtgaatagcactctggaaaagtcaagtgccctccacctgctgaatcacacttgacttttgctaaaatcaagacaattacaagattgttcctgatcctatttagtacggctggatggcccttgagccaaattagagggaggatgggcctggaatgagagaggatgagataggttccatgaagctcccataagaatttcactcttgaggcgatgccacagccctggcaggctgcacagaataaaagtccaccttggttagatgcttcacctgtttctaaaggaaactgtactccatcattgttcaggaacttaaagcattcatttaaaaagtaatagcaaacactcagtaaaagcacactttgaccacccactcttcagaccagggccccacccgtttcagaaataaccattcttaccaaattagtgcatgcctcttccagaattttctatgcatttacatacacatgtattgtttaatttttttcttggttttgttttatataaatgagttatattgtcatttcggttcaaaagcttttcttcctctacattacattctatcttgaaagtcttattagtacatatatatgcttttttttaatttttagaaatgggatctcgctttgtcacccaagctggagtgcagtggtgtgatcatagctcactgcagctttgaactgctgggctcaagcgattcttccacctcagcctcctgagtagctgggactacaggcgagcaccaacacacctggctaactttttaaaattattttttgtagagacagggtctcagctcgctatgttgctcaggctggtctcgaactcctggcctcaagcaatcctcccacctcggcctctcaaagcactagattataggtgtgagccacactgctcagcctgtctattcttgtcagcttgtatgtagtactccacagtaactttgtcattatttattcagcattaaatcattatctattccactgttaataaacatttagcttgttttcagtttttccagattccacataatgctgtgatggagagccctgttcacaccttctccctaaggtactgctgagtgtcttcctagagcagatatctacaagtgaaatcactagttcacggagcacacacagttattttaacgtatgctaccaagctcccccatcgtggctggattccccctcccacagccgggcatgagcatgtttatccctccccttaatgtttatagggtcctctttttttctccaacctaattgatgtttttccctaaatcccatcaggcctagtatgaccatcaaatgcagggtgccattggacagccctgagtaagaactgattgccaagtaaaggaaatccttagactgaatagaagaattatccttcaatattccaagttttttctccaggatccatgacatgctcatggtccatccagaaaagacatccaatgtagaagacagagagctggagtaagaggaagaaacagaagcaaaaacactgggagagcacactggctttgggccttagaacagcgtgtggccttgagcatggctctccaacactatgcatccttgtgtcccatgtctgaaaccgtccctacctcatacacttaccataagacttgaagaaaattaaaaatgccaaaaataccatactgagctgctgtcgaggttgtcgactgccttaaacaagagttcttaagcacagtgcaaacccctttttagggatgactatttccaccaaaaatgattgaggaaatccttccccatctcatcaacacaggatggaactcaaagtcatgcctaggcaaaggatatttggtcacagagcagagctgagctgcagcctcccacgagcattaatgattaagtgaccagctagttgctttttacacactcccctggagggcagtggggcatctctggacatggcactgatggaaaccaagccccaggtgaatgtagaggagtggatctcagtgttggcggcgcactgggatcactgcggggagcttcataaaaaaaggatgcccagagatccagatttaattggtcttagaggtgacgtggaggtgagattttgaaaagctcccccagtgattgtgaaatgcagcgaggttaagaaccactgccttagggcagttacagatatcaattctgaccatgcccttcaactaagaagaagagccgggatctgtatatttccttttttttgcaatttcttactgtaaaaatttttttaaaaggagaaaaagtagtgtcctaacacaagagtctcagaattgagaacgtgtgagacaaagatagcgtgagaccaagaggaacagtggcaatacttgaacgaaacagcagaagacaatggtgaaccatgccaggctaactgcctccattacacccttagtaaaaaggaaggggatgttgtagtttgctaggcataattatatgtgacaattttgaagtagggtttaatatttgactttaataattctcagtgaattccttgtgtgtcatcagagattagagttcaaggaggctgaggctactggaatttgcagggcagagaagcagaaaggagaaacatacaccaagaaaggattcctcaagtctgttgctgaacagtaaatttcacttttgcggaaaaaaaaaaaaaaaaaaaaaaactccataaaactaggcatagagtgaccagagaactataagtttgaccattcctagagctcactcagggctacagaaccttcaggctccaaccaggtggggtggagagtctttgttaatatccaaggcattcagttaagagcccagaaggattctgcagtagtggcagaaataagcttgcctggggaaaaggctgctgtaaacgcaagccagggtagcttcaccagtcccagaggaatccaagtaatccccagggagctcaagctcaggcacttgattgcctggactaagtcaaacaccctttgaagcaagacaactaaatccagcaatcaacaatgtagattcaccacatccagggtttcatgcagaaattactatacataggtagtagatatgtaaaatgacaaacatcataaaatgtgaattgcagaatcaaggtggtaggtatatgtcttaaatttttttttataataaaatgtaggactgggtgctgtggctcacacctgtaattccagcactttgggaggccgaggtgggcagatcatgaggtcaggagattgagacaatgctggctaacatagtgaaaccccatctctactaaaaatacaaaaaatgagctgggtgtggtggcaggcgcctgtaatgccagctactcatgaagctgaggcaggagaatcaattgaactggggaggcggaggttgcagtgagccaagatcgtaccactgcactccagcctaggtgacagagtgagactccatctcaaaaaataaaaagtaaaaaagtaggaaaaactactacataggcatataaaagagaaatataactaaaataactacaataaaagttattcaataaaaacagactcagcaatgacagagccaatagagacaagcacataaatcagctactatctgtgcacatgtccagaagccatgttaagcagaacttgttttaagttgtttataatttaaatttgtggatacatattttactttttttttttttttttgagatggagttttgctcttgttgcccaggctggagtgcagtgatgcaatctcagctcactgctgcctctgcctcccaggctcaagtgattctcctgcctcagcctcctgagtagctgggattataggtgtgcgccaccatgcctggctaatttttgtatttttagtagagaccgggtttcaccatgttgggcaggcttgtctcgaactcccgacctcagatgatctgccagtctcagcctcccagagtgctgggatttcagataagccaccacactcggcccatattttacttttcttagggacagggtcacccaggtgggaatgcagtggcacaatcatggctcactgcagcctcaacctcctgctcaagccatcctcttgcctcagcctcccaagtagctgggactacaggcgcaggccaccctacccagctaatttttaaaaaaaatctttcagagatgggatctcactgtgttgcccaggttggtcttgaactcctggggtcaagtgatccttttgccttggcttctcaaagttttgggattataggcatgagccaccatgcctggccaagaagaactttttaaatacttttttctaaaagaaaaaaaatgattacaaagcaaacagaaatactctaacattaccaattgcaggggagagagtcaaagtacaaaaatgattcacaaagcagaagaaaatgaaagtgataagcacatgaggaaaataatcaaccacactaacataaaacattgtaagtaggataatatcagattagtcaagattttaaaattctgtgttcagtgctggtgaccatgtaagaagacactgatccacagctagttgaaggtccattctgggttcctgtttcctggaaagcaatgcttagtgggacgggtaacttcctcatgtgacacagctggtagcagtgctggctggctgtgttccatgtctaaagtcgcagaggctacaccaggctggcaccgtggtctacaaacctgccactctctatcacctttttatttatagagatgagatgggtcactctcagacaaaaataagaggcacagttgtgggccacgacagagcagcaagcagggaaggtaggtccccagatagcggcctgagaggaaggacatacatgtgtagtggccctagcttcactcagacgctgtgtataagttgggggcagagaaaggtgtgtggcagaggaaggcccagctgcagtgtgttcccccaggcagctctgcgggttgaggacacagccaggtcagtcctttctgctcccacatctctccctaatcaaacctgttactggggaacctcagtgacaggctgggttctaggtgcatctggggactgccaaacataacatggcctaccacttgggaggaatgcaatatctgatagtccagtgtttccaaaggttggtaactgaaacagagaagttaaataatttgcccaaggccacacagctgagtcaaggaagtggggcttgttaggcatttcggccacctgcaatccaccttccaaattgcatccctatctttgtgtctcttctactattatttaccttaaacagttttaacttgactttaagtaaaactactttctaaagatttggctcaataaaaaggttataagttttatgaaaaaaaattaagttatagtgatagaggtaggaggcagccaaatgcctagacagatagagaagggtccccagtgaaacccaccttcaagtctaaaacaggctaaggactgaaagacgggaccgctggttttggatgaaacccgtgacccagaaggagaacttctgcctccgtttgcctgccctttcctgattgattctttctgaataatgcctttcaaccaatcaaatgttgccttttccgatactacctatggcttgcctgggcatgcccacctgtgttctaggagaatgggtggagccaccaggaattcacgtcttatgcaggggaggagcctgggcctcttcacctcctgtgcagcagccctggcattcaactgtgaagggaaaacctgcttggagagcccctgtctttgctgggagctttccttttgcttaataaattccaccctcctcacccttcaatgtgtctgtgtgactcatttttttctggtcatgagacaagaacctggatttagctgaatgagggagcaaaaatcctaaaaaaaaaaaaaatcatagatgtatattttgtatatatttaaattcactttaaagtaaatatataactattaaaatgtgtaaaaaaatcatcacacacacaaccagcagtaatttttgacacacttagggggcaagggctcccacgacctctgaactatcctgtgggtatagctgcagggctgtttgttcacacatgtgatgcgtggcctctacttgttcacaagaaacacagtgagaggcagacaatttgctcactgtcagcctcaactggaagaaggctcactgctggatgctcctgtgtggaagtttcccctctctccaggcaggcaggcaacagatcccagcccaacagacagcccccatgaggctccaatgcaccctcggccacagtattgaaggatgctgtttggaccagggcctctaatttccccttcatgagatgtgccgggtttatgatgtctctttcccagccccttgacttccaagcactgcccaaggaccccaacctccacctctctgttttctgcttttcagagtgagaactgttcgcccctgatggtgaagtctagtgactgatccagaggctgctttctgcaaccctgctgggtgctcagatgtcccttcagttgtgtccttgtctaagctggagactaaaaagcgggacgaagagagtcttcctctctctcctttttgtcctctctatcccctctgcttcctctctcccctccttctcctttctcttccctctgccctcttctctctcctctttctctcactccagtgtgtcttaggcctatttcccaaataagagtacctgaaagatggctgctagcatctcagggctgtctgcattattcattcttctactcccaaccctctatttataaccaagccttctggcatctgaaataatgaaaactatcctattagcagctttccgatggtctagactgctctttggaacatcccaaacacttttgtattcaagtttctcttctgactacaggtacttctcactctccaaaatctgactgtcagagctcaggaaccagcagtgccagggacacccctccttaggtgaacctcccactctctgaaccctcaggaaccaaacagactgaagcaagttgcttgcttttgttgcctgaactcaccgtccaaattctcactctctgaatttaggacctgaagagatgacagcaagggacactgtgtattaaactaactcagctgtaaccaaagcatctgtcgacatagttccactgcagcttcctcacagcagaacaacagggaccaaattctcacacagcaacccccaaaggcattctgggacaggcagcatccttcagaggctcacattctggtcagataagttcgataatgcgtccgtgttgaatgcagcagatgtaacccttccagcagattcacaaggcccaccagcccaagctgggcttcacaaatgcgaaggtctctttgctgcaagactttctagagctaaaatctatttgaacatacaccctttgttcaaatagcccttaatatccgatgtatcttgtatgcttccaaacacacccttggaaatccagatttggggtgcatatgcagattcgtgggttttaactagcactttgtcctaagacataagcctgcagtcaccacaaaccaggtctgcagaggggtccagttatctgaattttcaagatgtttccctggtgattctaaggtatagctctggttaagaagaaatgttatctgtgacattttgtgcacaacaaggacgtaaagaaaatgagtgcgtgtggaggccgtttgtgggacttcagacacgtaacatataacagtgatagagtgagatccagaatctcttgccctgaaaggcaaaggtcttttttaaaaacaagttggcccagcatggtggctcacccctgtaatcccagcactttgggaggctgaggtgggcggatcacctgaggtcaaagttcgagaccagcctgaccaacatggagaaaccccatctctattaaaaatacaaaattagcctggcgtggtggcgcatgcctataatcccagttactcgggaggttgaggcaggagaatcacttgaacctgggaagcggagattgcggtgagctgagatcacgccattgcactccagcctaggcaatgagaatgaaaccccgtctcgaaataaataaataaataaataaataaatgagtttttcttaaggtttgaacaaacttctgggtttttgggtaagggaggtgggttagggtttctgggtctcattgctaagctccgagattcattagaacgaaagcagcaaggctcacctacccacacagtccacaggagaccctcgcaggggaaaaccctgattctagacgtaggtggcactttccttagtaacgtgaccaagtgcacttgatagagtggtcctgttagcagcagtgaatccatatgatctgagacaactcaattcttgcctccttagaagaatttgactaaggggcataaggtagagggagagactgaggcaagttttatagcaggagccaaagtttattaaaaagttttaaggcaggggccaggtgcggtggctcacacctggaatcccagtactttggaaggccaaggcaggaggattgctttagatcaggagtttgaaaccagctaggacaacatagcaagacactgtctctattttttttttttttaagttttagagcaggaatggaaggaagtaacatacacttggaagagggccaagtgggcaactggaaagattcaagagcacagtttgacctttgactgaggttttacacgttggcatgcttccagggaactgcatctctcctcttctgcttcttcctttggggtgagctgtccgcatgcccagtggcctaagctcttgggaggggccgcatgcacggtgtgtttaccagagctgtggctgtgcgcatgctcacttgagtcgtttggtcaccgaccggttaaatgctatattgcttcttaatgcacatacttgagcccacctgccaactcctgagatcttatcgggaagctgctgatcaccagtttcaggtttttctatctattgggagactgccttttcttggtactgcctgcaatcaattattattttagagagagacagtgtaacaaccacctgaccctcacctgctggtcgcctgacattcctggtgggggctctcccgccctgctcctgtctgcctaactacctgctctaacagtccagtgggaggaggttggtcctaagcccactagctgctagggtaaataacacggtctctcttttttttttttttttttttgagatggagtctcactctgtcaccaggatggagtgcagtggtgtgatctctgctcctcactgcaacctccgcctcccaggttcaagagattctcctgccgtagcctcctgagtagctgggactacaggcacatgccaccatacctggctaatttttgtacttttagtagagatggggtttcacagtgttggccaggatggtctcgatctcctgacctcgtgatccacccgcctcggccttgcaaagtgctgggattacaggtgtgagccaccacgcccggccaacatggtctcttttggtctctgtgtcctcttctgtaaaatggtgacagttcctgccctgctcaccttgaataagaactttgaggataaatacattactgaaggtaaaaatgcattataaactctaaaaatactacatacatgagagctgattttgattgcttaaggtgcaaataagcccaggctgactgaagatgatgaggtgaccctgatggccgaacctttacgaatcctttccttattagcaagttgacttagtgggagctttgtttcctcagattctgtggctagaaagaccccttattttcctgctgccagggtcatctgtctagaacataaatctgaccgtgtcactcccgctccttcttgtcagatctcagaccaagtgtcagctccatagagaggctttctgctgtcctccatctgcaactgcagacctttcttatacccgagagacactgcagactccctcctgacaggcaccatgacatcagatggctttatttatttctttttcatctctcccctctcaagagaaggcaatctctctgaaagaaggtaaggagatgtttatgttattaaccactctttctaggaagggctagatcaatgctgtgcaggtacctgatgctgagagaaagagagagagagattgcaaggggaaccaggaaaccatcaatgttgaagagagagttatcctgatttccaggccctgattccaggttctcatgaggcctggctgcttatgggttcaataaaagcagcaggatcatgggttttttccaatacattctcacttttgcttaaagcaaattaaaatggtgtgttgttgccttaaccaaatacaccctaagccacatctgccactagagaagaggcctgtggctggcagggactgttttctgctcactcattgtgagtccccagggcctggcacagtgatgggcaaggaaacacctgtgaatgggtagagtttatctttatctctgcactgcacaaaagctcagttctcattttccatttacaatgttccaaagttttccaacataattccacaggtcagaggttacaaactgactacccagctgttgaattagcccataggcttttttttttttttttttttttttttttttaagactgggttttgctctcgttgcctaggctggagtgcaatggagtaatcttggttcactgcaacctctgcctcctgggttcaagcgattctcctgcctcagcctcctgagtagctgggattacaggcacacatgaccacgcccagctaatttttagtatttttagtagagacagggtttcaccatgttgggccaggctggtctcgaactcctgacctcaggtgatccacccgccttggcctcccaaagtgttgggattacaggcatgagccattgcacccggccttgttttgttttttaaaacattgtttttacctggacagtttttgaagaaagaaaagaaggaagcaaagaaagaagaagaaaaggagggaggaagaaaagaaggaagccaacattttaaaatggagtgagttcacatgaaaatcaacattaccagcccctctttaaaaactcgaatattttacagcactaagctctaaaagacctttctacttttacatcttatttttgatggttcagaagaaagcaatctgttcttgcatttaaggtaataaaatctgagaccccagattcctaaagggaaatgagtacaaacagaaagcttacaaatgtgttttccctttctctctctcctattatctgtcccaacaagaaaaccctgccccttccagggacagatgctgcaggattatagaacagtggctcagctgcggactctgccagcatccctgcaagaaatgcctctaagtccccacagttgcagccacatcttctgctgactggagtcacctgtgaagctgatctgcatatggcttctggccttgtttgttgagaaacctgctaaaacaaatgcaagtgtcgggagcggctcattaaagtttttgcgctgctctgcagcacggccctcacttcctgaaactctcatacctctcagagacttcgggtttttttctttctgaaagtctcaatcctggtgccccagggacagcagaaaagcccctcagagccccccaaacagggcatggcccaccaaaggccatggcagtatccacccattgttagaacacactttccttttttttgatgtggttttcactgggaaaagatgggatgtggtggcgaagagaccaataaacaaaaagttaaacacttaagtatacaatggttttctgaaaaataaggagagagagcatgcaaaaatgttactttcaacaactggaaaaaagctctgaaagtccatgcgtcgggcagtagccaaatccatgttccatcttaagtaggtttccctccctccctgcctccctcctatccttcctcctccctctcttccttccctttcttttctttctctctttcttctttccttccttctttgtaaaatcttgccaggtgcagtggttcatgcctctcccagcattttggaaggctgaggcaggaggattgcttgagtccaggagttcaaggtcaacctgggcaatatagtgagacctcatttccaccaaaaaaaataaaaaataaaaattagcttggtgtggtgacacatgaataggaggctgagtaggaggctgaggtgggaagatcatttgaccccaggaggttgaggctgcagtgagctaggattgtgccactgcactccagcctgggcaacagagcaagagaccctgtcttaaaaaaatacatcataaataaaatctgtcccgaaactatcctgactttcatcctccccagattgggctttgtcttcggagcctccatccccagatttctcggcccagagcttgcagatgttttctttgctgcaggctcaaagtgcattttgtgatacatggctgtctcaggccaggttcccccaggagcagacacagagacaggggactgagagcaacaactggctgggaggtggcccagcacctcatcgtagaagagtgtgggaatgagacagggacagaaggcagccagcggagggcaggctgtcacacaggtcaccactgtggcccctagagtccaagccctgaagaatcctgggagcctgtggagcagggggagctggggtctgtgttttccagccccatccaccagcagctgagggctgatgccacgccttttccctcccagcacttctggctggtcccaagcatgtgagcctgcagcagagtgaggtcaaaaggctcgcctagaaccccaatcagggcgccgcagcacctgctccaacttgtccagccccgggcccacctcagttaacagagcagtccctcttccagccaggaggcccttgtggcgaggagaatgtagaggtggagcacatggaggcaatgtacttgtctgggacaatcatttccttactcttatcacaacaaagccattccttcactgtactttagagacctctgtctcctcatgccccaaagatgttcagctggggttctcctcaaggagacagaaagcaatggaccttagattctgcgccagctgctctcttctccgccagggtttacttgggcactggcatgttgaaatgctgcggtttccaagccaaagggcttttctctcccggcaggcctttccagcttcctcggctgcgcggttcttcctttgtggcaggaaggctgggacttacggtggggttaattctgatcgtgtatcactggaacattctttcattcatgtgctagtgttcacagctcactgttgcttcaaagaagctcagtgcgtgagtatttgatattttctttatcgagatgctcagttctctgagtcgctagagcgtctccctttacatccaaattccagccccaccacagttctctccctcttcacagccactgccctctcatctgtcagtcactcagctctcatcagagtaaaagaacagccctggggctgccacaaaaagggctcttcactggagcccagccagcagatcccaactccaagtccctggaattagactcagctcagtggccaggctaagccccagcttgtgccggtgacaaatgagcgctgggcagagcaggccaggagggctccactgttgcttgaaagaaactccgatgaggtgagaatgatggaaaagcaaaagaatgccgtgcaatgcgtgtgtgcataacagccctctctgggaggaatcaacagggctgggttaccaattagatgtggagggcgagggagacctcagacccctggcttggatgaggggagtgtggggaagcaacaacaaaaacagggactggagggcaggcagcctgtgggggctggatggtgtgggaggggcaggggaaggctgctcaacagacccgtgccatctttcattccaccgatgccctccatgtgctctacggtgtgctggaaacacaacaggaagcctcacaaagtatttgtctttatggagctgacatgctgctgtaagaagtcacaaaataaacaagatgctaataagtcaacaagatactttcacagagtcccttggtttggttgtctttgtggcaataagacagagagagagaaagaaagaaagaagcgctggaaaagctgtagacacagctgcagatagcaggagttcacagccctggccttgtattagaatcacctgggaaggttttaaaaaatgtactcatatcggcagggcccggtggctcacacctgtaatcccagcactttgggaggccaaggcgggcggatcacttgaggtcaggagttcaagaccagcctggcccaacatggtgaaaccccgtctctactgaaaatacaaaattagctgggcgtggtggtgcatgcctgtaatcccagctacttgggaggccgaggcaggagaatcacttgaacctgggaggtggaggttgcagtgagccgagattgagccattgcactccagcctgggcaacaagaggaaaactccatctcaaaaaaaaaaaatacttatatctaatgatttattatatacaacacaaagaatacagtgataaaaaacttgataaattagattatatcaaaagtcacatcaaatagacattaataaaatcagaatatctggggttggggagtggtttggttaaaggccccaggtgcttctaaggtgcagccaagctggcgaaccactgggctaggcccctgcccaaaaagatctgacctgactggctggggagaagcttgggggctttgaatctccccaggtagctctgatgggaggtgtctgagaacccctggagagagatgctgaagctgctgcctccacatccatcccaccactccctctttgagtagcatcagggcagtgtgggtagctcaagtcagcttgggggctgtgcctcattgtgttaaaggtggtcccattatgtagacagtgaccaccccaggagtgagccagtgacataccagcagtgcattgccaaagactttggggaaagtttttttctcattcttaagaaagaacaagaagccatgtttgcttccctattaaacattatattaagtgaaataagccaggcacaaaaagacacagttcacatattctatataatttgtgggagctaaaaattaattcaattgaactcgtggagatagacgaaggatggttaccagaggctgggatggatagtgggaaaggtagggggtgggagatggggatggttaatgggtacaaaatatagttagataccacgaatgaggtctagtatttgatagcacgacagggtgactatagtcagcaataatttcttgtacattcagaataactaagagagcacaacgggaatgttcacaacacaaagaaatcatgaatgcttgaagggatggatggctgccccatttccctgtgatccgtgcacactgcacatctgtgtcagagtatctcatgtatcccacaaatatatgcacctcctaggtacccacaaatatcaaaaatagatgtgactgaaggagcttgtagcacaggtgacactgatgggaaaaataagtcttgggaagaagccaacactatggctgcagaaaacagagaacacaggggcccttgatgctgtaatcaagctgcctggtcctgaaactctcactgcctctgctgccacatatgtgagccactagatttgcatcctatttaagccagtttgagttgatttttctattactgccctcaagtgacacaggcagtcatggaaggtgcctgtgagaaagttcaacaccagaaccaagtaagaccaatggatggaaatgatccagccctgtgaaagcctcacagaagggatttgagcatgaggaatggaacccatccagaaataagaagacgcttggtgcattgatgaaacaggaaaaaatgtcatcgttaacaattccaagagctggcctggccagtcacagaatgcgactctgagcagggaaatatcagacacattaaagggcataaaggtcactcaagtgagtcacccagtattactgaggagcactccacatggcacaaaagagggcagaagtccagagagtagtcctgttcttgggatgcaaatggtgtcactggaagaagacgggcgtgctgcctataacaagggcgggtcagagctgtgatgacattcgacccctcaggttggtcccgggcagcacactctgatgattaaatcaggaacaggcaggcagaggggtgtgtgtgtttcagagaaagctggtgatttgctaaccaaaaatgacaaggagaaaaaaatcagaattcttatagcacataaaggacattaaacatggagagactttattcttctagagcattcatttaaagctcatgcctgcagtcctgagtgtttcccttcatcaaacaaggatcaagaagagaggaaatatggtcttcaaagtaaaaaaaaaaaaaaaaaaatgtaaagggtcgtttctgaaattagcctggaatgtttcattgctttacagggagagagcagcctccaagaagcttagcagcatctgcctcttgtctgagcttctatgtcagtttctcccagggcagattttattaaataaacagcaaagagtccgggctcctgagcggctcagaaactcttgcatctttgaggagcttgcatatgctcacgccactctggaaaaccaggtagagaggcacttttcagggagtccccagggtgctgaagcaagaagggcaataatttggttttctttaaaatatatatatatgagacatagtttcaccaggctggagtgcgatggcgtgatctcggctcactgcaacttctatctccaaggttcaagtgattctcctgcctcagcctcctgagtaactgggattacaggtgtgtgccactacacctggctaatttttgtatttttagtagagatggggtttcaccatgttgatcaggctggtcttgaactcctgacctccagtgatgcgcccgcctcagccttccaaagtgctgggattacaggtgtgaaccaccatgcccggccaaaaaattgaggtaaaatcttcctatataatttgccatctttatttttaagtgtacagtttagtgctcataaatatttataatgagggtaatgatttgaagagaaattcaggactcccaggccctctgtgttcctgctgactgagacaggatctgaagcaaggctcgaatctctctgcgatcagttttcttgttaatagagttgagatgcacttgtccctctgcttcctcccaggggcacaaaggaattactggcctggagagacttggaaacacacaaggagcggcgctgatgggaggagctggtttagaataaggcagagacggaacaaagaaggatctttcctggggtagagggagggtggtgggaggacaatggggagtgtggggttgggattctttccaaatgctcaaaagagactcaaaatagactcagtccattcatctcctttatgaaaaccctacaatatcaatgggatgattgctatgagtaaaaattaggaaaactaagagattcagtattggtcaaggcttatcagcagtcttaattgctttaattttagtcaatagacatcatcttcttgtataaggcaacgcttttgtcctggtgactggcaggcctggtacactaaatgccttagcaaagcaagctgggccccttggtcattaccattgcaaacatctgcacgttccctccaatgctcccttgcaaccctgctaaaaataaaatcgtcttttaataacctcaagagcccaccactgtctcctctctggaatgttcactgaggaccccagtaagaaatggaaattgcctcgaatgctctctcctctgccttgacagtgctgctgccggccacgcactctgttgggggaagggcagtgttgatcagaaagcgagctccttgactgacgttatctcctcctgggcagaaaccaatttcagcaagaactttgtaatttggaattcaaggatgtaagatgcattcagggaaccattttccccctacaaattacagtttgtcatttaagaggtttaatatcacaaaaagggcctgcttctgcctttttaaaaaaattttaaaaaatgccacaccgatgctctcagaacagaggcttaggaatgagaagaatggcctgtacttcaaacaaacccattgttccttactagaggcagaagaataatgtcagaaaaaatagttatttattcagcaagctcttgaagtgctcaggcagagtggtggaccccaatgcctggcatatagcacgtggatcccaatgcctggcaataaccacgtgaaggaaggaagaaggggagggaaggaggcagggaagaagaaatacgcagacactgtgtggtaggaattccaagacatagtacattattttatccaaacacaaacacagtatttaatcaagattttcccatgatgcactggggcaagacaatcatgtggggggaggagcccaggcagcaaatgtctagaatgagaagaactgggccacaggccaggctctcaagtcagagtcatgctgaaacctgctccctttctttctttcttttttttctattttttattatactttaagttctagggtacatgtgcacaacgtgcaggtttgttacatatgtatacatgtgccatgttggtgtgctgcacccattaatttgtcatttacattaggtatatctcctaatgctatccctcccccctcccccaaccccatgacaggccccagtgtgtgatgttccccatcctgtgtccgagtgttctattgttcaatttccacctatgagtgagaacacacggtgtttggttttctgtccttgtgatagtttgctgagaatgatggtttccagcttcatccatgtccctacaaaggacatgaactcatcctttttttatggctgcatagtattccatggtgtatatgtgccacattttcttaatccagtctatcattgatggaaatttggattggttccaagtctttgctattgtgaatagtgccgcaataaacatatgtgtgcatgtgtctttatagaagcatgatttataatcctttgagtatatacccagtacaaaaattaattcaagatggattaaagacttaaatgttagacctaaaaccataaaaccctagaagaaaacctaggcaataccattcaggacataggcatgggcaaggacttcatgtctaaaacaccaaaaacaatggcaacaaaagccaaaattgacaaatgggatctaattaaactaaaaagcttctgcacagcaaaagaaactatcatcagagtgaacaggcaacctacagaatgggagaaaatttttgcaacctactcatctgacaaagggctaatatccagaatctacaatgaactcaaacaaatttacaagaaaaaaaaataaccccatcaaaaagtgggcaaaggatatgaacagatacttctcaaaagaagacatttatgcagccaacagacacatgaaaaaatgctcatcatcactggacatcagagaaatgcaaatcaaaaccacaatgagataccatctcacaccagttagaatggcgatcattaaaaagtcaggaaacaacaggtgctggagaggatgtggagaaataggaacacttttacactgttggtgagactgtaaactagttcaaccattgtggaagacagtgtcatgattcctcaaggatctagaactagaaataccatttgacccagcaatcccattaccgggtatattccctttcttatcagttgtatgacaataggcaaactgctttatctctctgaacctcgttttcttcatttagaaaacagagcttatgcctattttggaagacattgttaattcactcaagacccagccaaatgcagtggctcacgcctgtaatcccagcgctatgggaggctgaggtgggaggattgcttgaggccaggagtctgagactcatctgggcaaaaaagtgagaccccaatgctacaaaaaattagccagttgtagtggagtgcacctgtggttccagcttctcaggaggctgaggcagaaatattgctggagcctgggaggttgaggctgcagtgagctgtgatagcaccactgctccccagcctgggagacagagtgagaccatctcaaaaaaaaaaaaaaagaaagaaaagccattcctagccctctttctttcttgtctttctcagctttaaagagcagaacactcagtgccccatttccaagtgtgatgatgagggcagtcggcaatggggcctacgagaaagccatcatgttcttggtaaagggaagatgttggtttggtctcctgaaaagcaaggcttctgagagcagaggccacgttttctcctgtgggaccccaacttgccaaacccagggctgaaagtgtggctggtgctcatggaaaacccaacttgaaatcaggaatggccggacctgccttgagctgtatatgttgcagtcacctttgaatacaaaggccaaaaaaattctctgtggttggctttggagaggttgtcaggaagagctgtaagaaagtgatgattcacagcaaagaaaacaatggatgaaataaaaaggcagcctgcaaatagggaaaaacacatctgcaaaatatcagataggaggttcatatgcaagatttgttaaaaactcatacaactctgccggtgcggtggctcatgcctataatgccagcctttgggaggctgaggcgggtgaatcacgaggtcaggagtttgagactagcctggccaacatggtgaaaccctgtctctactaaaaatacaaaaaattacctgggtgtagtcgcaggtgcctgtaatcccagctactcgggaggctgaggcagaattgcttgaacccaggaggcggaggttgcagtgagctgagatggcgccactgtactctagcctaggcaacagagtgagactccatctcaaaaacaaaaacaaacaaaaaaaaccccacaaaaaacctcatgcaactcaatagcaagaaaacgtgtaacccaattaacaaatgtgcaaaggacttgaataggcatttctccaaagatgaaatgaaaatgaccaacatcattaggaaaaagcaaatcaaaaccactatgagaaaacacctcccacctgtcagggtggctacaataaaaaaaccagtgataacaagtggtggtgagggtgtggagaatgggaacccttgtacactgttgataggagtgtcaattggcaaagcaactatggaaaacagtatgaaggctccagacaaaattaaaaatagcactaccatctgacccagcagtcccacttctgggtacatactcaaaggagatgaaatcaccatctcgtcaaggcatctgcactcccatgctcactgcggcacttcacagcagccaaggtacgtacacgccctaggggtctatcaatggacaaataaagaaaccatggtgtgtgtacaaaacaaaatgttactcagccttaaaaaagacggagatcctgccacttgccataacagggataggcttggaggacattatgataagtgaaataagtcagacacagaaagataaataatgcataacttcacttctatgtgaaatcttaaaaaaaaggttacatatatacacacgtatatacacacgtatatatacacacatgtatatatacacgtatatacacacatgtatatatacacgcatatacacacatgtatatatacacgtatatacacacatgtatatatatacacgtatacatatatgtacacgtgtgtatatatacacacatatatacacatatatacacacacacatatatactatatatacatatatatatacacatacacacagagagagagagagagagagaataaaacagtggttagcagggtcaggataggggagcaggaggaaacagagacatagctcaaaggctcccacatagcaaatatgcaggatgaacaagtctaaagatggaatgcacagcaggagggctgtggctgataacagtggatcctcttctttgctaaatgagaagattataactgcttttgccacagggggaggcagatgccttaaaaaaataaaatgattattgacaaagtgataaataataagagtgaaggaaatttgatgattaagtttgcaaaggggaaataaaacaatttgtccagcactacaccatagcaaaacaatgtgtttaaaatataaaacaaaataaaactgggtcagatgtatttattttttgttgttgctattgtttttaatttaaaattcagccactctctcaagggcctgctcatgatgaaaaatacattccagtttttacagctgccataagacctcataagagcagtggggtaatttcaagggacttctcttgaactacaggggggcccttggctctatgtttagtgaagtcttgcaggagacttgatgataaaaaccacacctgtggacaattccttctctaggtcccatgctaggacagagcttactcctccagcccctactggcggtccactctccaagctgccattcctttacccaggacactcacagatacaactccaacccacaccttgggtgagacatgtcttgggctaaagcgcgagctattattcagaaccccaggactgagaacccttcacagtacaaatgtgaggttgtttttttcttccttccttttttttttttttttttttttttttgagacagggtttcactctgtcacctaggctgagtgcagtgccatgctcatagctcactgcagcctcagccttctgggctgaagtgatcctcccaccttagcttcctaaacagctaggactacaggcatgcaccattatgcccagcaaatttttaaattattattattatttgtagagacagagtcttgctatgttgtccagcctggtctcaaactcctggcctcaagtgatcctcctgcctcagcctctcaaagtgctgggattacaggtgtgaggcaccacacctggcctgatttttttcttttagttagcatcaagtgttcattctggtccccaaagttcagcaaatgtataaatactgagcagcagtgtgcccatgcccctctccctggtcagcctttacaacactgaacacgtgtgttatgctcccaaaaacccctccttaagaatgggaatatgcaagggaaacacaacactaaacctcttttgttagcattcctgataaattcgcacttattactccagtgaaaattgtctgtatgcagagaaagtgctttaaacacagcagattggtcagcctctggtcccctctggctcctacaaactttccaatccttttactttgaagctgggtcactgcagtgaggtgcgtgttgttgttctgcagaatccagttgcatttcatcacagagctttcataagaatccatttatcaaattattccttcgaaaactggagtggcacagatcaaaccaactgaggagctgcgtgacactttaagtcccgatgtcagtgctgcccaaatacaagctagattatcaagtgcttttcaagaacactttaatgccttgttctcatgaactctgacagtctgacgattaggattaaaatgggtcatttgtaggaattgcataagggccggaagttacagccctttcagaaagcacttctgccagccctcccaccaggagtcaggggtggcccaggatggatgggtgtgtcagctgggctctggaagctcactgtggcaccctgtctgcagcagatgtctgtgggggccccacttgcacccccttggttcctggcatctgcatttctgctgaccagagggccaacagcctgaatgcacttcttttcctgcaggcttgcttctgtccctggaacccactctgcccatagatgtggcaggccagaaatgccagggaattcagctctccaggagtgacccttggccaatggctgacagaagctaacgaggtgtgccccagatctctcattcattcgtgggtaaccctgagtcctgagtgtaagttcccccagagtggctaactccagtggcccctggctgactgggtagttactcaccttctgctgctgtcttcccctccatgcctcgcttccacactcccctatctgtgcttcctgggttcacttcccaagtaaaccacttgcactcacatcctggcctcggggtcggcttccaggggaacccagactaagacactgctatccttgctgagatttaagacggagcgcacatctcccaggctagggagggaacacccaaagccaccgctttcccagagactctgacccagctgggaccattaccaatgtgcatcacttgaccctagatgtgaaatcaagagccggaagaagccatcacagcagacacagcagtggccaccccatgagtttccagaagctctcatgtgtgctccaaggactggagttgaacaaatgggaggaggaagaatgaattgttttcctgctgtatctccttctacaggcagctttccgctggctgttgtccctcttgtcatcttctgtaggcttagagagaaaatcacaaggcaagagagaggatcttgcaagcatagagctgtgaggtgtgatgaaattgtcaagttcctgtgagcccgcgtgtgagaataaaggaaacttgcatctttgtgggtgacagaaacaccagttctgttagcagaggcctccccaggaaattcagtgtctgtaattctcttattgtgagaagataaatagcattcttattttgtgaatttgaacccatcaaagttttgtagttgagaatgccacattcatgtccatccaaggagcattccctgactctccacagtagggctggcctgtgctgagagtgggacacagggaaagaacacatagtcccggcctcttcagtagcaaacagaagagagacatacaccaagaaaaaatggcatgaaatgacattcgccacagtgaaaaagcaatgggccatgaaatatggggcacagattcagtcactgaaatcggggaggttccagaagcgagtgacatcgaagctgagtgttgagggagaactgttagcagaagaaggggcatgagcagacaacattccaggcaccatcaaaaaggcagagaagcaagaagaagagctcaaagtttaaagaacatcatcttattccaaataattgagaaaatgttgctgttcacgcaagtgcaaatgatgtggctattttaatgtatgttcacatttaacagtgttttcttttttgtattaagtaaaatacaggactcagtagacaaccctgatgctccatccttaagcttcaagtgagcctccccagagctgagagctgcagggtacaggaagtgggggatgccatgtggaggtgagtaggggaggaggaagtgaagggcgggagcaggcaagggaagtcagagatgaggggcatggtgagttgcggagtgtgagaggtgatgcagggagcagcaagagatggaaataggagggtggggatgacctgtttatgttttcttaatgcaattggtttggggaccatcacaaaacatacaacttgtcaaactgcccaaggccctccagctctctccctctctctctcctctcttcctgtaacatgcacacagacattcaccacaaggagctgtattcctggatgatcaaccaaatggactgtctagggcctgtcattacatttccatgactgtctctaaatcactttgtcctgatttcagaaccaaggcggtaacctcccaacccaatttccttgaatcttaccaaggtgatggtgaattagtgttgatagtaaataaagtcagagctttgagacattattgaagaaaagacacaggaaaataaaaacaataacattaattagctccaagtcagtataatttcctatctaaaataataaagaggctttaaagaaaataaccactaaagcctatctttgtgccaaaaagtccacagagccttatcttctcacaaaggcccctccaaaggtcatcaaccttattcccattttggagagacctcagcctctggaattgctgcaagaaaagtatgactgccccgaaggactgaagcattcagatttcataaaaaacatctgtttgccttttatggctggttttacagaagatggagatgttagtaaatattccatttcttaaaaaatgtcagtaattttagtgactttgtccctcagtaacacatgaaaagtgaatggatgatgcaaatcttgaaaagataaacatcagtatttacataaggagcgttacccaacgaattgagtggagcacagaggggattctttctaagtaataagagactgtcctgaacctcaaaacacttccagtatttgtggagacaaaattcacaacaaagaacacagaatctcacatggcgtcttgtggggtgggctggaaaatggtgagagcccacgtgttctccaggaggagcaaggcatgtatacttagaggactttacagtttacagatgactttcatttttcacgatcgcatttaaccccccacaacaagcaggcaagcagtcttctgttctacacaaagctaagaggggcccaaggctgtgcagcactaggaacaattctggaacttgaaaccgaagtcttctaggtccagccctgagcgctttctccagaaactctgcaacagacctccaaggtaacaccacactgctctcaccactcggcacagtgaccatccttaaacgaatggatgagcactcagaagaatgaatgagtgaaccctgcccccacggccctctggctcactccactctcctcattctctaatccctaaaactccaggcttttcactattcagtggccgcaggaagactccgggtttttcatattttatgcatacagctcctcagagggtcgctttctaataaaagcactgagcattgcagagaaaaatctttctttctaatcaggagaaaagggctttcaaggtccgaggctgaaatctgcgttgtgaacgttcagaaatgaaatgcatgtttcatttgcaacttttgaaaaggtctgtgaggatgcatttggcctaggtttaaacggaaaatgccttcatactttaatatttacaacataaaattaattagtttttctttgatgaaacttgaatcattcagctttcagaagccaatttagcatttccattttgttctcttctacacacaaacatgcacacacacatatatgtgtgcttacatatacatgcatacacagtcacatctgtatgcatcacatatattcacgtgcacacctacacacctgcacatatgtacagtcacacttcattcttctcatgcacagactgatttagtcaacacagaagagtagaaggaatcagtattggactgcgccgcctgctgtgttttaatattcaactatttaattccaactcttaatgtacttcccccttgctattctgctgatgtttcacttttagagactccactctgctgaatcattgtaccacagaattctgagttggggcagcttaaggccacctgaggctacttcccctctaaagcatgaatcctctcccaacagtaaccagaccaagaagttcagactctttgggatgcatccaggaatagagaacttgcgccctgctgaagaagtctcattctttttctcatgtctcctgactgcaaaggtcttcaggtcataaaattcaagtcctgtttctgcttctgacccgtggattaccacagacacatcagattctgttctaagccctaggtttagcaagagggtattggaacaactgatctttaaggtccaactaagacgttttaataatgcagacacttaaaatatcctgccttatttggagccaaaaatctccttccttacagtgtccaccccctggtccaagctctgacctctgggattataccttcatccttgtgtaagtgagtgatagctgcaccatttcctccaggcgggactccccggctctctgcaaagctgtgtcctgggtacctcttgtgcctgcctcccatcattgtggtccacctttcactccagccgttgctgtggcaaccagcttgtgagggtggagcccaacagctcctcatctcagctgcactatattcctcccaccttctgctctagaggtagctcaccttctgatgctccattgtggagtctacaggccagcctggaccagagggaccaaacatctgggtgttttcaggattgaggggattttggggttgcagcagggcttttagtttgaaaatcaggacagtcccaggtcaagtgggacaagttggtcaccccagcatgggtttaggagggccttaacatccacggaatgaccctcagcaatggggggctccaggagctggcagctgaccgctcccctcctcctgccctggacagacttggtgggtgcattctatacatacagctcctcagagggtcatggaagcatgaggccccattgcccacagtggtgattaatttggtaactccccaattagaaaaggcttttccacctatcttgttttgtgctcctcagtccccccatgtctgttttctagaataggatctcacaatgaatgaactacacacaagttcagctttgggttcagctttgggaggggattccaggctctggcaggcacctgggaaatttggataatgaaaatgtcacagggttgcacgttttggatgctggacttctcatcctaaggtccagatggcattcttctagagtgaagatcatgagaaagggtcttggtttcttgacagcttctcagtattcttgcttgcacatcaagacagccaggttactgcagaaaatcatttctgtagttgttggttcattttctcaaaatacgggatttgggggttacgtctgagaaccacacaggggatcttgcctctgatcaaaatcaaatcaaaacacctcctgtggtgacagagcaggcattttatttcctgacaatatttctcccatctgattcaatttcagcaaaggaaatttaagtagatgcaggtgaaagaattgagaactgagagctacctgacttgtgttcctcagtaaaaaacaaacaaacaaactgaaatatgtttaacggaagagggggagaagcccactaccctcttacacatattctgagtcaagtcgagcttttctggggacaggatgaggaaaccaggtgactgagtatttctccagtactcatcatgtggcttctgcagcacattacacaaagcatcttactttattccttagaatgaccccaaggtgacctttgcccttgtgaccccattttatggctggagaaactgagagtcaggaagatgagggaatttcaccaacatcacataactagtcatctgcagactggggctcaaatctgggcagttccagctccaaagtctataaccctaaccagtgcactgtctggcctctctagagaagtagagttcagacagggtcagggggcccctttgtggtatcatcccccttcaccacatctgcccttctatgtcattacttgagctctttcctctaaggagaattcctttcctacccacccccaccacccctcaccccagccccctgccccacagctccggctgtgaaaaccctgccagtccttctcggcccagatcatgcccccccgaccaaagcttcttcagctacgtgctgggcagcatcccttccgccactgaattcccatagttgttcactatcgatgctatgtaaatgcacacatcaaatacttaatgaacacttactatgcaccaggccctgcactaagcattttacacagatgatctctacatcaactctatctcaagttactattatctttcctattttataactgaggaaaacaccacccagagaggttaagtatgatggggcccactctttcactcccttctagactccaggctagagaaaggagtgtccacagtgacacaggccaccaatgcagtttgttggccaaaggtgctgcagcacaataagttttcacatcagccttgatgtccaaagctttttactggccccttggtactgcaaactttcctcctggatcttcctcccactatgtctagcttcagccttcaatcaacagaaatgtattgagtgcctgctacattctaggtgctgtttcaggtgcccagaaggttctttttattgggagatagacatgatagataggtataaaagaacatagaaagataccaagacctaccaccagcttctgttttgtttgtttgtttttgcttaagataaattatccagaacttgataagagacatctgaatctttctttccacaatctattaggacccaggcattttaaaattttatttattaattatttttttagagatggagtcctctctgttgcccaagctagagtgcagtgacgtgatctcagctcactgcaacctccgcctcccaagttcgagtgattctcctgcctcagcctctgtagtagctgggattacaggtgtgtaccaccacgcccggctaatttttagtagagacagggttttgccacgttggccaaggtggtctcaaactcctgacctcaagtgatctgcctgccttggcctcccaaaatgttgggattacaggcgtgagccaccacgcctggacattttacgattttataaaactgttaaggtgcaacaaataattttctgtctagtagtgacaataacttccaagggtgggattttattgccctgcctggtattaaccagttttgatctaatttcatacttctatcttagcatttattttttccctgctgacattaaaatcccagttcctcatatttctcttgtgaacttggcttgtcattaatgaattaaataaaatgaagagatatttgaaagttgcagctaccaggataaagttgctcttgtcagacctggataaaatagagccaggaaggcataaaaaaggagggagggagggtatgctttcctgtctgagatgagaactgttccaaggactgtctgaaaaccccacaggaaatccctcatgtccttcacacatctccagctctgcacggcttgcatgtttctcacgtgtgcacgtatttctatgacaaggtttatcactagacagtctttaggaccatggcaattcagataagatgctctcaaagaacacctgctcaggaatggcatctccaccaacaaattcatgccaactcaggcattgagcctccggcacccatgaattctgtttctacacagtgtaggtaaacttcccccttctgccaataaagccgctctttacccttccctcagcagatatatccggggcttgccacagtgcaacctggattacaatcctcttctttactttttcttttggagatggggttttgctctgttgccctggcaatcatagctcactgtagcctcaaactcgtcagcttaagtgattctcctgcctcagcctccagagtatctaggactacaggcatgcaccactatacccagcaattttttaattttttttttcgtagagactgggtcttgctatgttgtccaggctggtctgaagctcttggcctcaagcaatctaccttggcctctcaaagtgctgggattacaggtgtgggctattgtgcccagacatcttttctaatcactgaataaattcaacatatttggacgtatttttctctgatgtctttttttaggttgacaaatgcatactacaaccatatgggaattatgtttttttaaatttttaatatcctatttgacaatcatattcagagaattaaaatgattgatgtaatcatgagtcaatgagtggtccctctagaatgtgtggtcaggaaagacttttcagaagaggggcatgtgagctaaaggccaaaaacaactgggcctgcgaaaatgaggacaaggttatttcaggtggagagaacagctaagcaaaggactaaagcagctggcatgttcagtggcaacctgataaatgcttagcagctggctgggtcaggggagccctgatctgtggtgtttgcccatttctgtggcgtaaatactcccaggattttgagcgatgatgcaaggtcactgagtttggagttggaaagcagtgaaaatgagccaatctgagctggttccagcacacctcttggtctgttccaagaaaagaaataaagccagaagagcagaggagacaaaggagacagttgcaggagatgaggtcaaagaagcaggcaggaggctgatcttggaaggagcctagactgcattccaattataacaagaagccacgcggaaggtgttaaagcacagagtgacactccctcttcctttctaccttcttggtgtttttctcaagaggaaacaaaggcagaataaggagtagcgcaaatcctctcctcgtcttacgcatcagcagtgaacacgtccttggcgtctcacctcctacctcctgaggcatagcaacaaacaccatgacacagcaacaaacatcatggcacatcattttccagtttttctcaatagtgagcactcaattgtttttgagagcaggtaagtaaattcattctcttaagactatacagaaaagtaactgttaagtaaaattgttttaaaatggcctttactgtttcaaactgttaaaaatggtcacagaggtaatttaatgccttttaaaaggcaattgctgtcagccacagctggttgactgcctgcacactgaagctgctggaagagaaagacgacagccgttgtggtaataacatgctgccaagagaggtgacttcgtccatctcaggcgcagagctgaaggtggatgctggggaagggagacctgttgctgaagctgttggagagcttcttgcctctgtggcttatcccatttaatctagtgggctattggctcaggcaccagggggcctaaggaatggctataacctttcttctgagtttcaccctaaattgggcgctagagcggcagccacagaaaatgccctttccagtgtgcctcgtactttcttctcccaactgcgatctcctcaagggaaatgttaaagaaaaagttagtcagtgctacttgtaaagcatggtaggtaagactttatttaggaccattgcaataggtatgggatgcatgggcaagtaagaatttatggccaaggagaagcataagggtcagcagatggaaaattacatcggggtgagggaggttctgggtaaactgacctaacagtttcttactgaggcatggtggggggtgatcctacatcacctgggggatggcagaggatgaggagcctgatcagatatcaagggcgatcagatattgatggtggtgggtgctaccctgacttagcagggatctttgctaaaactagatcttacaaggcagtgcatgagtgagcccagcagaatattcagaagccggactaaactggcacagcaaagaatctttgtcagaggagccacatatgatttattcctataccccccacagtgcccaatgcgtgcttggtcaataatggattttcattaaatgtccatccaccagcaagcaaatttcactggatattccatatgtgcctggcactagattaattgacagggacttggagataaacaagataccacaccaccatcaaatgaacagcaacagtcagaagacagagaaatgagggggcacacagagagaaatagaggcagagagagctagaggtaaaggaaataatacaccctaagggttctacaaaggatctaacagggttaacaggtttataaagacatcaacaatcagagaaagagagccaaagagatctatagaaacagtgggtgctgaaatatcagttaattaaaaggttatggccatggcaaggaaatagtaatggctgctttaaatttttccaggtaacactgtcttggctgtgcctaatagtatagaaattcagcagggctgggcacggtggcttatgcctgtaatcccagcactttgggaggctgaggcaggcagatcatgaggtcaggagattgagaccatcctggccaacatggtgaaaccgcatctctactaaaaatacaaaaattagctgggcatggtggtgcgcacctgtagtcccagctactctggaggctgaggcaggagaatcgcttgaacctggaaggcagaggttgcagtgagccaagatcgcgccactgcgctccagtctggtgacagagcaagactccatctcaaaaaaaatcagaaattcagcagcctaaatcacgtgtgggagcaatcccagaatggttttctgatgagtgttcagggtggctgtcaccctgtacagactctgaggacccaaagtgccatcagcccgcatgtgatgtgagtagggatgtacggggatcaggtgctaaatggagtcctggctcaaatatgtctcacagtggagtgggtccccatggcagtcattgctccagctcttgaatttatcattggaatggccaaacaatggctgcagaacccaagaatttgtttcttgacttacggaataaaagctatcacaataggaacaaccaaatggaagcctctgaagatgccccttatcctttaatcctgacctgaagaataaatcaaacacaccacatcctaaggagagtgaagacaggtgccacttccaaagacataagggatgcaggagcaatggtctccgtttaactcacaagtctaacctcttcaaaaataagataggccatagaagacaacagcaaactactacacatttgagcaagtagtacccctactcacagctacgctgggtgtttgtttttactagaacatatgaatgcatacacatgtggaatgcagctactgatttggcatatgcattattttaatacccaccacaaaagagattcagaaacagttagcattcttatggatggacaacagtagacatttacaggctgttaaccctgctctccattataatataaccagaagggacagtccaaagaacttcacactggtgcactatgttgatgacatcatgttaatcagacctatggacaagaagagcaaatattctatatgtttcattaagaaacacactagaaggtgggagagcaacctgcaaaaccttagggtcctgccattttggtgaagctgccttttgggaccagtagtctggggttttctcaaacatcacttaaaaagtaaaggacaagttattgcttagcggtagcaccttctaccattaagaacaaagcacattaactggaggtctctacaggttttagagtaacacaaaccacgcctggcaatactctgacccatttattaggtgacatggaaactattagttttgagtgggcccagagcagtaaaggccctgcagaaggtttagactgcagtggaaatagctctgcttggactataacctggaagaatccatgcgaccaaaggcatttgtgttaggaaaagtgtgtagtagatgagttgcagtgcagacccttgtagttccagaaaaaggctgtgccatccacagcaaagaactatgggccactcaaagcgaactcctgacatcctgctgggccctggcggaatgagtgtctgaccatgggacatcaagagcttcagggaagagctatgtagatggacacatgagggtgggcatggagtgtgaggatcttagtgttgtaagttaaccctcactagaaagcatccactgctgtgacaaggaaccaagtggatagaatgatccagctagtagatgtcagccagcctctggccctggctactgctgctcttgtgaagtgggttcatgagtgacacagtagtggaggcagagatggtggcaaagaatgaggctaacatgacccaacatcatggggtccctctccccaaggctgattcagccacagctactgattggtgtctaactacagccacagaaggtgggtgtctcactaaccagtcacttgcaggcaagttgattatattgaacctcttctacactgaagggactgtgagtcatcttcactagaaatggcatatatctatgaatatgggtttgttttttctgtccacaggccctcagccagtcctgcaatcctagggctcctagagtgtctgtagatctactctatgcattctgtgacaggattccacatagcatcacctcagaccaaagggtccactttacagcaagaaaaacatagaggcgggcacacagccatggcatccactggtcctaccatgtgccacaccacacaggaactgctgggggataagcaatgggatagcctattgaagacatagctgaagaaccagcttagagatgacactctgcaaagagagtggcaccctttaaaatgtggtatacactttgaacaaagggccattatatgatgctcggtccccaagaggcagaatgcttgggtcaggagagtggaggctagccactgaaaccaatggaagtgccagcctcaccaagagacagggagattctgaaagcctgatggagaaggtggatgatgagtatgaggcatggcttcaggagtggcaacagtggagggctatggtttgtccctatttctcttcttatgagtttccccagaaatggtgatcaaccagaagcctggagaagctgtgtgccaaggaggagtacttgaaatatatatacgctggtgattctgatctccaaggataaagttaaaattcccaagaacttttataaaagtaaaagttcaggttaccttaaaaagaataaaaatctgactgccatcaaactgctcatttgcaacatggtattctggaaataataaaactttgtcttccaactttttatggaaaattatttttactgattgattgattgagacagggtctccctctgttgcccaggctgccatgcagtggtgcaatcacagctcattacagcctttacctctcaggttcaagtggtcctcccacctcagcctcttgagtagctgggaccacaggtgcacagcactacacctggctcatttttttttgttttgtagagatgaaaatttttatgttgcccaggcttatctcaaacttggattcaagcaatccgtcctcctcagcctcccaaagtactgagattataggcatgagctactgtacctggctgggaaattatttttagcccagaattctatatccaatatcaagaataaggttaaaaataaacatattaaactcataaaaatatcataaattcaccttctatgggaaaataaattactgaaggatgttctctgcccctcaagttctgggacctcagcaaaagcagcaggaaaaggctggcatcatcgggacacaccttccctcaggtgtctgtggctcctaccagcccaggctggggcttctgcagggctgtcagccacaacctctactgtgggccctccatgtgacccctccacataagctagtttgattccatgggtgagcatcccaagataacaagcatataggcatggcctttcacggtctgggctcagaggtcacatagcatcacgtctgctgcactctgctgatcaaggcagtcaccaagacccagccagggtcagggagagaacatggtgtagctgtaaaagcatgggggttggcagacattgttgcagtcatttttagaaaatatgacctgccacggcagtgagcaagggcaccagtgacatccatggtcaaatccaagtaactctcagtggtgtgactgtgagacataatgcaattgacaagaatgagaatttttaaagctttggcctatataaaaaattaaaaaatgaatgaaatatagaactaagattccaggttatttcaaaataatgtggatgttaggagtagaggtggaaaggagagtataatgtgtgctaagtgtcttgttcatttgaagtagttacaggtagaaattaattctggactttaaattatgactatattcacatggattagtaaaatgtttaaaactcttgtataatactttggcattaaaaataataactttaaggccaaccattagaagactagacataagatgtaatttctaaaacagtaaaataatggaagtgacaaaaaacaataaaacaagaagaagatattttaaggccaaaacatgaaataagatggtagtaattatgtaaacacatcattagtcacaaatgtgaatttaatctcctttttaaagagagaaatttttaaattggaatgttttaaattcagctgtatgttatttacaaaaaagcatgcctaaatttggaaaaaaaaaaaaaaagagagagaggaaaatttgaaaataaaaaaataaatgaagatataccagggaaatgctaactaaaagaaagcagaaatgtcaatagcaatagtagtcaaaatggacttcaaagtgagaggcattaaatgcattaaataggaatgagacatatttatattataaaaattacagttgcctccaaaatataacaatcattaacctttatgaacagagcaatattatattggtatttatagagttaaaactcctggaaacataagagaaactgacaaaccacaatcttggcgagagattttaaaacctctccaagaaattaagataccaactagatgaaaaaaaattaagccatagaggacataaatagttattgtactttcatataaacttccagtttctaatttaattaactatatagttgcattgctaatatgaattgttctcagtaaaaaggctgcacaatgttttcaaatacctgttggattttttttgtttgtttgtttatttaccaaaccagggtatttagcatatacattacctcctacagttattatttatttgttgtgagaacattcagaattgtctcttcttgcctttttagagtatacaacagagaaatgttaaccacagtcaccctcctgtgtaatagaacgccagaacttattcctcctatctaactgtaacttcgtactcactgaccaacctctccctgtttccagtggaacaacctttaactacccttttattagtcaaaataaataaataaataagttgccaaaagtcaaaaatcacacaggtcacattcagtgatccaataaaaataagtttcgcaaacacctcgtttcgaaattaaagcaactctaaatatatcttagtttaatgtgaatatcaaaactgaaattacatctcttgcctgagacctaaaatagtaaaacacatggaagaacacagcaggatggtggctaccatggcattgaaggaatgtgatgtggggagttgttgttcaacaaggataaaatcaggtttttttgttttgttttgctttgttttgagacagagtcttgttctgtcccccaggctggagtgcagtggcatgatcttggctcactgcaacctctgctttccgggttcaagcgattctcctgcctcagcctcctgagttgctgggattacagacacatgccaccatgcccggctaatatttgtatttttagtagagatgggcttctgccatgttggccaggctggctcctgacctcaggtgaccctcccacctcggcctcccaaagtgctgggattacaggtgtgagccactgcacccagccaagatcagttttaagatgagtaagctccagagatctgctatacaatgcagcccctgtggttaaaaataatttaaagggtagatttcatattaagcgttcttaccacaaaagtgggtggaaacacaaggcaactctgagaagtgatggagatgtttattaccttgactgtggtgagggtagcatgatatagacacatgtccaaactcactgaagtgtatgcattaattatgtgcagttttttgatacaccaattatacctcaataaagctgggacaaaaaatttgcttacactaaaattacaaagtaaatagaaataaatgtcagtgagagtactaaaggtagttactttttttggtcacttttattcttttagtattttagaaattacatcttatgtctagtcttctaatggttggccttaaaattatttctttaaatgacgaagtatatggatgtcaccaaagccatatttgatgccaattttggtcacatttgcatttattagcacacatgaaagaccaaaaatagaataagaattatactcaagaaggtaaatgtaaatacatccttaaaaagtagaaatttaataaaaatacagcagaaatcagaaaattcttttaaatgaatactaactcataaccaaatgtgtcatcctgagaatgtaagaacatggcaacattaggaaatttatgcaaaaaaaaatacactatatagaaaaggggatgccacgtggtcagctcaagaggcagaaacacattctgttccccccctcccccaatattttattatccaggaaaaaatttaaactttcttaacttgataaaaggtagctttcaaaacctacaataaataacatacttagagtggcagcattagaaatctattaaacccaatatacagtaactatcatcttaactatccagcattattccagaggtcctggaaaactccagaaaatgaaaacaagaaattctattaatattcaaaaggaaggcaggctgggcgcggtggctcatgcctgtaattctagcattttgggaggctgaggcaggcggatcacttgcggtcaggagtttgagaccagcctggccaacatggtgaaacctcatttctactaaaaaaaaaatacaaaaaaacttagccgggcatggtggcacgcacctgtaatcccagctactcaggaggctgaggcaggagaattgcttgaacccgagaggtggaggttgcagtgagccaagattgtcccactgcactccagcctgggtgacagagcgagacgctgtctcaaaaaaaaaaaaaaaaaaaaaaagaaaaaaaatatgtattcaataggaagaaataaaacctaatctactgattataaacatgattgtttatacaaaaaataatcagctaaaaattgttagaatctatgagtttagtaaggtggccaaataaaacaacattcccaaaccaataggtttcctgcacaccagtagtaatcaattagaaaaagttgaatttcagtatttatagttttctaggaattagtctatttcttctaagttgtagacattatgaatatagcatcatccttttcatgactgaaggatctgtagagatatttcctgctttatctggacattggtgatctgtgtctttttttctattgtgtcagccttgaaaaagataaaaagaaattgaccaggagatttgtcaattttactgattttttttaaaaagaactgccttttaaattttattgatgttctctcattgttcacctgttttcaattttataattgaaaacatctttaaaaagcagaaatgtatggtatctttctcatttctatctgtttgctttgagtttacgttgttcttctttttctaggtttttcgtggaaagcctctgaaacgtctacctggagctctctgtgtagttgtatggatacctccccaggtgtgcctctctgagaggacaggtctgccttgagctataaacatggcatttgtcggccaggcgcagtggctcaagcctgtaatcccagcactttgggaggccaaggcgggtggatcacaaggtcagcagtttgagaccagcctgaccaacatggtgaaaccccatctctactaaaaatacaaaaaaattagctgggcgtggtggcgggcacctgtagtcccagctactcgggaggctgaggcaggaagaatggcgtgaaccccagaggtggagcttgcagtgagctgagattgcaccaccgcactccagcctgggcaacagagcgagactccgtctcagagaaaaaaaaaaaaaaggaaaaacaaccctggcatttgtcagcatgcatgctgttgaaagctgtgggattagatgaggtgataaggtgcaattgtgtaggcagggcccaggacaaagctgcagtgttttaaggtctggagaagaaaatccagcaaaggggactgagggatggcaggagcgaggaggaagagaatcagtcagaaataatgtcactttgggaggcaaggcgggcagatcacctgaagtcaggagtttgagaccagcctcgccaacatgatgaaaccccatctctactaaaaatacaaaaattagccaggtgtggtggcaggtgcctataatcccagctactcgtgaggctgaggtgggagaatcacttgaacctgggaggcggaggttgcagcgagccaagtttgcaccattgcactccagcctgggcgacagagtgagactccatctcaaaaaaagagaggaaaaaaaaaggtcaaaagagcagcacttttcagaaggaaaacatggacaactgtgccatgctgatgagagatcaaacaagatgaagtcctaaatggttcactggaagcagcaacgtggaagcccctggtgactttgacatgagcagtttcactggagtgtggcagacagaatctgactgaggagctgggggtcagggcgggagggggtgctcagcaggcaagggtgtcacatttgttaatgaagacggtgtcacatttgttaatgaagatgttctctcctttgaatgagatgatgcatttagtgtgtaacagtgtccggctcacagtcgggccttgctaacactttgctttcactcacttccttatctttcattcactgaccagaaaggttaatggtggctgttcctcttttgaaaagcggattgggaacaccagcatagctattttgacactgggatttctgttagaaaagtagatgtgacttattccctttgggtggaactccttttctagaaagggaggcaacacacatgttgggtaaatctcagtttctagagtcaggctgccataagttaaatctcagttccgcccccgagacatgtagctatggggattttacatgaactcccgagtctcagttttctcaccatcaaccattcatcagaatagtgcctacctcaccaatgcacaccttaagcacctggcgcctctgttagctaccatttaagttgagaatttccctgtgaggttttttcagaggaggttccttctacaataaaccaccaagtacttggtccccttttgcagaaatccatccacaccatgtgtaaacacaggggctgggaacttgcatggtaaaccaggtcagccaaacacggattaacaatgccaggcccatttcacctgcaaagtatcagcgactcttcaatcggcaggtccccagctgccttgcagcacagccagggcctagcatagcgctgcctccttccctttcacttgtcctcaggaatccccggagatccagggtgaggctcctttagtctaatgagaaggaggcattctgactttttaggttattttctcttcccagcccctggcagatggaaaaagaaaacaaaacaaaacaaaacaaaaaaacaaacaaaaaaaaccccgccacaataattgctgcttgcatgaatgacctcaatacgggaagagtgctgagcgcctaagtccttgcactgctgccaggcctggcgtcatcatgattaacacagcaatcaccggccagggagccgggccgctctgcctaccagacaccctgactgggtgacttacggctttatatttttaaattggcctctctagcaccgtctgataaatcaacacacaagtcattaaatggttcattatcccagtaatatgattcattctttgtgccaagaaatgcaggagatgtcaggaaacttaaaaatatctcatttgaagccatgagtgcccatctacataacagattaactggatgagagagagtggttggacatggaggtcaaagagaagactcagcaggtggtggtcttacctgcagcagtcctttacctcctgctgaaaaatgtaagtcacactctcactaggcaggctctgtgctggccacactttctccctcataggctcagaaggcggtcatgctggctgcaggcacctgctagagaattcacagccgagggcactcagctagggtcattcctataggaagaacaccaagtccagaagatgacggggccatgtgctatggaagaaagagcactcggtcccagttctgccaccaggtctgaaactctgggtacattgcttgaaatgaaatcacaatactttgttgtcatcatctgtcaaacaagaaagtcattctccacattttttcaagttctttctagctctaagattctatgactctagtgtgttggaggagaagagaggaaggcagagttgagagcttggtcagagctgagttccaatgtatctgatatgtggattatgtaggagactcttccaccaaatctacatacactattttgcatgaaggttgctaatttatgttgattgtgtcagtgatggctcctttagtagaaagaagaaaaaaaatctaaatgaaactggcttaagcactaaggacatttatttgtttgtgtattctgcaacctctgaatgtttgctttggtctccattacaacacctgggactagaagagtccctagactcatggaacttaattctagttggggaaatagataataaacaaaacatatgtaactatattatctaatgtcaggtaatgacaaatgcaatgaagacaaacaaacaggacaggtgaatagagagatccttttttacacagaatggtgatggaaggtctctttaaggcaattaatagctgatacaatgttggtaaataaaggtatgacaagaagactatgagaccttcagagaagattcctgccaggaagcacgactaccaagagcacagatatgtggttaagcataccaggcgaacccagtgaactagatttctgtggaggatggaaggaaccagcatggtccaccctgttggggagctcagaatggagctgacagtgttggctgagaagtttggaagggttcctatgacagggccacatgttgctgtaaccaagagctcagcatctgccaaggactcaagtgaatcttcaggcagatttctacagcccccacttgctcagctccctcttctccagtggcctccctcacaaactccaacagtccacaaccctgatctctaaatactcggcttagtgagatcaatgcttttgttgagtttctacctctctgcatttcagaaaaaaaccccaaaaaaacaaacaaaaaaaacggcccaagaaagaaagctgggaccccctttttagaggcacgtgaaccagaacaactccatcttgaataggagctgggtaaaataaggctgaaacctactgggcttcattcccagatggttacggcattctaagtcacaggatgagataagaggtcggcacaagatacaggtaataaagaccttgctgataaaacaggtttcagtaaggaagccggctaaatcctcccaaaaccaagatggccacaagagtgactctggccatcctcactgctacactcccaccagcaacatgacagtttacaaataccatggcaacgttgggaagttaccttatatggtctaaaaaggggatgcaggaataatccaccccttctttagcatatcatcaagaaataaccataaacatgggcaaccagcagccctcagggctgctctgtctatggagtagccattcttttattgctttactttcttaataaacttgctttcactttgcactgcagactcaacctaaattctttcttgcgtgagatccaagaaccctctcttggggtctggattgggacccgtttcctgtaacatatttctccgtcctgcaacatatttctggccaccatgaacgtatgatactgagaaaacccccccgacttggaggaaatggactgcggcactgattggatgacttcgggtaagtgggtggggcacccaagtaaagaatgggattgggttagaggcccaacttaggggagttagtctctcctaagacagagtgggttagaagcccctcttaataaaaggcagaatgcttgacggaccttgggttagaggcccaacttaggagggttagagtcccttctaagatgtatggggttagaggcccctctcagtaaagtccctcttggctaaaaccaggtttggcaccgcaggttatgctctttgtattaatctgcctcgtactgtttgctgacggctgtgtgtgggtgacagggttaggcatgtacaggattgtgggacatggggagctttttcctccctaaaaggggaaacttgagcactaataggattgctggaaaagatccattggctactgacaagcagccgcctgaacttttcagtgtcgctgcaatgggtgggtctttctctggcctccccaagcatttctcgccttccccaccctgccccaggcaatgcttttctctctctcctttccctttcccatctgttctgttactcagggtgaccatcttgcccagagaccacgtgttgaaactccaatttggaggctggattaaaggtgacggggtccacccatctgggggcaaatttaagccctgccagtttgacattgcatgctaagcagagtggctaatgtctatgttttatcacatgtattttgctctggccagaacgaaaacaataattttcctttatgatgcagcttggcccccagggcgatggtgccgcaagctggattactaggggcgctcagggaaagggaatccagaagcctggcacgccagcaaaagggcaagaatttcttaccagtcagatttctggcttctctctgtgcaaacagttgatgtatggaaaaaaaacaaaatcagtatttatctcctctgtaaagttttgattaatgcgaaaaagaattctaaggctagtcttaacctagtgtgtttggtgctatgaatttgtttttctgtgtcaaggggtacttcaggataaaacacaggcttagaacacctgtcagtccgcttttcaagatgacccagcagctggtcataacaaacttggctgcaggtccctgaaacaaacaaacagacaaaaaaactggatgaagtctccaccttgttttatgtccttgggagcttgacgttttaatcacgtggtgataccttttcttggtctcttccttgtcccttccagggacaggaattttagggttcatgtaatagctctaaaaaatcatactgaataaaatcatattaaataaaagtctttgcaaactcaaaattaactactctagactccttctgggaaagaaaatggagactgccccttgctgtagctcagtagctagggttttgcactttcgcagtggtggtccgggttcaatttttcatgtaggaagttatttctggtttagtatctgtgtgaccttgtctattctcttgtgcttcgcagactgtcttaaattttcctttctctaaggacatgggaggttacctgtggtaaagttcaaaagctagaaatatcagctatttggcattagaaattttaaaaggacattattaaagagtgctacggttaaaatcaatttaattaaaagcagatagattcctctcaaaatcaaaggctattttgttttgcattgttatcgacagttttgagttttgggggtatcagaaattactttacattatgagagagctttggtgtgtaataactatgtaggaaatatactttaagggatggctaatagtagttatggaaggatacttgactctttgcacacttggatcagagaagcatgctcttggccacctgaaagatgattaaacatccccaccccacactgggggacgagactcccataagggatagtctaattacaaaataggctgattggctttgggttgccttgcaatgaaatgcaggagagaagcactgcattgtcttctcccgaaatatttccctccttttggggatccaggaaccggtataaaatgacactcttaatttgggggatctgtctttgccttcagctgcttatttggccctagaaatgcatgctttcctggccctgttcctccaagggctccaccctgaagccagtaatccagttaagaaaggtggttcacacctgtaatcctagtactttgggaggcccaggcaggttgatcacgaggtcaggagttcgagatcagactggccaatatgcttaaacctgtctctactaaaaatacaaaatttagccgggcatggtggtgggtgtctgtaatcccagctactcaggaggctgaggcaggagaatcacttgaacctgggaggcggaggttgcagtgtgatgagattgccccattgcaccacagcctgggcaatagcgtgagactccatctcaaaaaaagaaggaaggaaggaaggaaggaaggaaggaaggaaggaaggaaagaaggaaggatggaagggagaaaatggcaaatgaaaaatcttacaagtgctgaatcttctgtctgtggatttatatatgttgcatgtttatagataaaagagctctaattaactggcttagaaaaataggcacttaaatattttgtcagaaaaacaggaactttaatgcctttttgttcatgtgactttagtaatcttttggaaataatgacagttctaaaaattattagtaaaataaaatgtctttaaaaatgtagacatttggtctaaattaacgtcaaatatcagatttgctaaatgctttaaggtcaaattgtttttctgacttttgaaaattgttcaatttggctgggcccagtggctcacgcctgtaatcccagcactttgggaggctgaggcaggtggatcatctgaggtcaggagttcgagaccagcctgaccaacatggtgaaaccctgtctctactaagaatacaaaaattagctgggcctggtggcaggtgcctgtaatctcagctacttgggaggctgaggcaggagaatcgcttgaacccgggaggtggaggttgtggtgagtggagattgcaccattgcatttcagcctgggtgacagagcaaggttccaactcaaaaaaaatataaataaataaataaaagaaaaaagaaaaatgttcaatttacctactttaaagtcattagcttctagataagggctgggacatgtggaattagccatactccctagctatacaaacaagattataaagaaagagattttacataagaagggatctcacatggtaaattcttgtcctaaagtaaaataactggttgtttaaaaggagggatgtttaaggcaagtcagaaagtccaagaatgactcagatggtctgtgtaagtcgtgaaaggaactgtgaaagggaatttatgcaagaaatgtacaatccaaaggttcttaggcctcctaaatccttcataaaatgccactatgactcttacttaagtaagagtaaggcctggggacatttggaattagccacactccctagctgtgctagagagtcagctcttatctgcacttttgcctggtgtgtcctaggcaggctacacactagtacacaattaaaatctcgaatttaccaaggttttcaccaaaaataaaagttgctaagagttaacattataacatgtaattaagactactgaagaaacagttttacatgcaaggtgtgtaagaaaagcaaaatgtgtttttggttaaaaaaaaaaaaagattataagaagtcatgggaatgtggttttttttctgcctaaaatgttaaaggattgttttaagtaagaaaaaaaaatttttttaaactagttgtggaaggtttataaaaattaattgtaagagattctgtgtttgaacatattggctaaagttaaaggaatattattcactaaacattggaataaaagcacaatgggtttttctgctctttcacaaaaaatgtaaagagttataaaaggtttataagaatctttccttatggttaaacattaaaattgggtaaatatgtctataaggttttatataaaaattggatttaacattaatagtacattaaaataaaggtaaaatttggcttaattgatgtaaaattcatacaggaagcattatcaaatgtaaaatggtgtttttctttctttagatatttgcataaatgtgttattggcatatgttccaaagttatggaaaacttctataattctaatataacttagtgtatgttattaataattataattgttatgtaaaattctgtgtaccacataggtaaccaaatttcctgatcaattatggctttaatggtggctgtcctcaaactttttatcatccacaggcaattgctgtcttgttttaatcccctttaaaagatggtttgtaatcaactataaaaccctggcaggtgttaaatacaagtttttctaataactttggaaattgtaatattaaaataaagaaaacaacattcaaaactctcataaaaagctaaaatgtttacaaatatcaaatacaacagaaattaacagaaccaataggaaactgaagtaatcttttcaactttgcttaaaacactgctaatcctttgttttgtttttcagagtcaaaaaaaaaacttttttaagctatttacagcttataacaattgagtaaagtatactgctgtgaaaaaaaaatggaaacatatttttctctacctaatttttccaaaatttaggaactagttgtaagtatgcttaacttatggcaatataattatttgtataagtgcaataaaaatctgttttcttttgtaacaagacacaattgaagaaactggtcattttaccaaggctttaactggaatggtgtgttttcccttaagaaattaaacttaacttgtagagccaataaaagcctcatgggaaactggcctcataccttgcctacaacagtgcctgtacagggtttctgacctgtggtaagtaaagaatgccactttctaacaggtccagaagccacaagttatcttgggacctcaagaggaaagaaatttaccaaactcataggtatttgatggtacaaacccatggataagcttggccttaaaagccttatctaaaattccttctatggaacagaattccatcaaagccaatttaaaaagaacctatgtgaaaaataattattcttgctgcactttatacaaataatcaggccaagtataataaagcaaattggtcttaccataatttgcatttagcaaaaatgggaaactggagagagaaatattttgtttcaaaaactatggtatacttgttattaaattctagtctcatcagtcattttgaagtttgtttctgcaataagcaggctaactcttcttcttccggtgaaccaaccagtgatgtctgactgttgctcagaagaaacaagagggatgggcaatgtaaaaatctggattagtattctaattctgggcacattacaatcagctagcaaccccataccagcttagttccaacagttgcccaattcatgaaaagccttctaatttagtttacttggaataactttacttattttgcttcactcttgtggaatatattgctgttatactctgtgtaggaatataaaaaaagcttactaaatgttttcttaaacacttattaatcttccagatatcacctcttgtcaaaactcaagagtcataaatggccctcaccatactgatgttttctaactgagctcctctctaccctgaacacaatagaccctaacaggcagaaatatcatcacccctattcagcctgaagaagttacagaaaatgaatcttcatacctctgcgacccttaggattaagggttctcttataaaagggaagggggaaatgtcagaggtttgtgaaccagaacaactccatcttgaataggagctgggtaaaatgagactgaaacctactgggctgcattcccagatggttaaggcattctaagtcacaggatgagacaggaggtcggcacaaagtacaggtcataaagaccttgcctataaaacagattgcagtaaagaagacggctaaatcctaccaaaaccaagatggccacaagagtgacctctggtcgtcctcactactacactcccatcagcgctaagacagcttacaaatgccatggcaacatcaggaagttaccctatgtggtctaaaaagggaaggcatgaataatccaccccttatttagcataccatcaagaaataaccataaaaatgggcagctagcagccctcagggctgctctgtctatgtactcgtaacccattcttttattccttcactttcttaataaacctgctttcactctgcactgcggacttgccctaaattctttcttgtgcgagatccaagaaccctctcttggggtctggattgggagtcctttcctgtatatctctgttctgtaacaccttgaggctcattttgtgtgtttcctttctctcaacaatcacagttctgcactgtgtaatgttcagtgtctgaaaacacctgcttcatgtttgtctaatttaatagtagttttctgtgggaatgaaagtctagtactagttacactgtcatggccaaaactgagggccttttgggtgtcttctaatacccttgattcttattggcagctgcctactctgagtaaatgcccaacaaaatacgaaacagctcagcttcatgtcttccaaccaacctcagaaaaaagataaagtctgatttaaatttcatatcaaaagcaatatttcaactatttaaagctacaataaatatacaaccatacggaaatctgtaaccaaatataaaaccctctaaactaaaacatttaacacagcagagaccaccaatgtaacactgggttaattcatttttgtgtaaaacctgtaataaagtgtaccaccacatttatgtttaatttaagagcctctttactccagaagtataaggggcccaaatcagaaaacctattgatataatttaccacattaacaaaccaggaaattatatggttatttcaataggaaaagaaacagtattcaataaaattcaatctatacacataataaaacatatattacaataagaaaagtaaaaatgaaaagcttaatgaaagatatttaatttaaaagccacagaaaacatcatatgtaacagtgaaatttaaaaatcattctcattaaagtcatgctcaacactaaggtgtcaagtgtctctgcttgtattcaacatgtcattcaccattttttttttccctgtggtatctcttgacctggtctcaaggcagccagaactccagaaacacaataagcattgataaaaagatctcgaagagaagccctctagttcaggctcaagaagaggaaaaggggtctcctgttaatacaagttgtggcagccagaacccacagcgctgggaactcaaagaaagaagagccttcctcttcagtgaaaagagctactgtccaaagggggtgaggcaagttcctgttgatttttcctctctgccccctactctctccagatacacactggttggccttggatatagacatagttccagaaagaaagtgcaaaagcaaagtaaataaaacttcaggtttttggctagaggactaaaaaaggagaatcccagtaccaagactgcagaaaaggaggagcttgggaaacaataccattaaggtgtttatgaactcctgaaatcaacctcaagtttagcattcaggttctgattcaaagcagcctacaaagacattgagaactaaactaagagaccatgacccatgtcccagattgaccaccagagggtacacatgtaggacaaatttaaataggactgcaaaggctgttaaaagtaaactaatatagagactttatcccagagaaggccactcagaatttacaatctaagcccaatcaggtcaattggctgctaaaacaaaaatgtcaatattctccacagggtatatacaagacccagtcctgtagtacacaatattgaaaatgtccagaatataataccaaattacatggcacatgaagaaccaatgaaattacaaattgcatgagaaaagacaaccaacggatgacaacagtcagatattggaactcatccaacagtaaacctttccaactgatgctaaatttgtctgacaaaggctttgataattatcccactagtaagggtaaacgtatttatttttatttttaattttttgagacagagtctggctctgttgcctaggctggagtggagtgcatgatctctgctcacagcaacctctgtcttctgggctcaagccatcctctcacttcagcctcatgagtagctgggactgtagacagataccaccatgcccagctaactttggttctatgtatgtatgtatgtatgtatgtatgtatgtatgtatgtatgtatgtatctatctatctatctatctatctagtagaaatggggtttcaccacattgcctgggttggtcttaaactcctggctcaggcaatccacttgcctaggcctcccaaagtgcacggaataaaggcatgagccacagcacctggcctaagcatctttaaaataaatcaggtaatagaaagtctcagcccaaaatagagccaaacatacataaatgtatatacaatacacaaaagaaccaaatataaaatccagaactaaaacatacaatgaataaaatgttaaaactcattaggtgtactcaatagcataattgagatgacagagtgaaaagttcactggaacttgaggatagatcaatagaaatattcaaccttaaaaactaagaaaagattgattaaaaattaatctgggctgggtgcgatggctcatgcctataatccagcactttggcaggctgaggcaggaggatcacctgagttcaggagttcgagaccagcctggccaacatggtgaaacactgtctctactaaaaatacaaaaattagctgggtgtggtggtgggcacctgtaatcccagctactcaggaggctgaggaatgagaatcgcttgaacctggaaggcagaggttgcagtgagctgagattgtgccactgcattccagcctggacaacagagcaagactctgtctcaaaacaaaacaaaacaaattaatctgtgggataaaatagaaatgcctagcatttgtttcatctgagtcgtagaaagaaataataaagactgcagtggagacataatatttaaagaaataatgtatagaaactcttcaagtttgggggaaaaaataaacctacagattcaagaagctcagaaaattgcaaacagcgaaaacacaaataaatcaatgcaaagacatattacaatcaaactttgaaaataaagacaaagaaaaaatcttaaaagcagccagacaaaaaaagatgcattgcttaaaaaaggaaaacagtacacaagacagtggatttctcatcaaaaatttctgataccaaaataataataataaaaaaatttcaaccaagaattctaggtccaagaaaaatactcttcagaaatgtacatcaaaaccacaataagataccacttcacatctactaggatggctataataaaaaagagacaataacaaatgtttgcgagcaggtgaagaaattgaaacccttacacattgctcataggaatataaaatgatgcagctgctttggaaaacagtttggcagctcctaaaaaaattaaatatagagttccatatgccccaacaattctacttctaggtatagacccaagataattgaaaacacatatttacacaaaaacttatacatgaatattcatagcagcactattcataatagccaaaagatacaaacactccaactatcaatcaattgatgagtagataaatataatatgttatatccatacaatgaaatgctattctgctgtaaaaaatacttaagttctgatacatgctaatatggataaaactcaaagaaattgtgcaaagtgaaagaagccagaaagaaaccgccacatattctatgatttcagttgtaggcaatgtccagaatagacagattcatagagacagaaagattattgatggctaggggctaggtagaaaagaagaatgaactgctaatgtatacagggattttacgggtggtggtggtgatataaaggttctagctttaggtaatggtgatagttgcacaactttgagaatatgcaaaaaaaaaaaaataaaaaacaaattgtgtactttaaaaaggtacattttatggtatgtgaagtatgtttccaaaaaaaaggagaataaagaagttctcatttaaagtaaaaccaagagaattcattgtcagtggacctgctctaagagaattgctaaagtagtcactagacacaaaggaaatggtaccagaaagaaacttcagagcagaaattttaaaaaagcaaaagaaatttaaaatatacgaaaaaattgagtaaactattcttctgttgaattctttaaaatatgttatgtttcaaagtaaaacaatatttttaaatgaaatttcaaagtatgtagatgcaatacgtaataaacatataggccgggcgcggtggctcacgcctgtaatcccagcactttgggaggccgaggtgggcggatcatgaggtcaggagatcgagaccatcctggctaacacggtgaaaccccatctctactgaaaatacaaaaaattagccgggcgtggtggtgggcacctgtagtcccagctactcgggaggctgaggcaggagaatggcgtgaacccgggaggtggagcttgcagcgagccgagatggcaccgctgcactccagcctgggtgacagagtgagactccgtttcaaaaaaaaaaaaaaaaatcatataagaaattacaacataaagggggaagaaggaacctatagagaggtaagatttcaaaacacatgatacagtaaaatactgattctgtgtagatagtgaacatttaaatgaaaatattgtaattactagggctaccactttttttaatttaaaaaaagtacgtacacaatgagatgtattcaaaaacacaagatatagaattgaattaaaaattattaaataagccgggcacagtggctcgcacctgtaatcccagcactttggaaggcagaggcgggctgaggtcaagaactcaagaccagcctggccaacatggtgaaaccccgtctctactaaaaatacaaaaattagctgggcgtgttggcgcccacctgtagtgccagctactcaggaagctgaggcaggagaatcgcttgagccagggagacggaggttgcagtgagccaagattgcaccactgcactccagcctggccgacagagcaagactctgtctaaaaaaaaaaaaaaaaattattaaataacccaaaagaaggcaggaatgggaacacacagggatgataaacagaggaacaaggagatacaaagaataaaatgatagaactacattcaaacacatcaacaattacattacaggtaaatgatctaaatgcaccaaataaagagattgtcagaacaagtttttaaaaatacataatccaattatatactctctataaaaattctgcttcaagcataaagatatcagtacattaaaattaggagaaaagatacaaaatgcaaacactaaccaaaagaaagctcaagtggttatattaatatcagacaaagtagacttcagagcaaacaaatttagcaggatatcatacaataataaaagagttcatttataagaattacataaaaaccctaaatgtatatggaagctaaaaacaaaccttcaaaatataaaaactgaaaattaatttttggacaaattggactacatcaaaattaaaaactttaactctgaaacaacactgctaagagagtaaaaagaaaggctacagattgggagaaaatatgcgcaaatcacatatccaacataagacttgcattcagaatctaaaaggaaattttttaattcaacaataagtaagcaaacaaccaaattaaaaaatgggcaaaagaggtgaacagacactttaccaaacagtatttaaggagagcaaatgagcacatgaaaagatatttaacatcgttagtcattatgaaaatgcaaattaaaaccttgttgaaatgcaattacacacataaataaaaataacgacaatgtcaagtgagagtgaccatgcagaacagttggaactgcaaacattgctgtgggaatgcaaaatggttcagccactctgggaaacagcaagtttcttataaagtgaaacacacacttaccatatgacagaacgtcaattctactcctgagtacttagagaaatataaatttatgttcattctaaaactggtacaggaatgttgatagaggctctgtttataattgcccactggaaacaacccagatgttcttcaagggatgaatggttacataaatgagccaaagatggcctctgtgttttggcccctatgtttattgtaggttgagaccagttagctcaaaatcctgcccaaaccaaactcaaatttgtacataccgagttatttataaaattgcctgaacaagcaaatttttagctatttagagctttcctgctttgcatactccaagaaacctcacccaacagctgttacctactgataaatagggccttgcagttataaaacccaaaattcctgctgcctttggtttgcctgacccaagacttcctgctgtgctgctgtgagacacccttgagatacatacataagccccatattcaaccctccctccagagttctcttgccttattccctttctcattggtggtctcattagactgtctcatgcaaccctgtcttactgccactcaataaagttgtgtgttactgcctctcattgtcatatgtttttcctagctcagtccccaaatccctaaaacccttaggtgaatacataagcaaactttagtacatccacacaatgaaacactacttagcactaaaaagcaacaaactattgatacacgtagcaatctgaatgctcagtaaatgaggccagaatcaaagttgatactacagatttcatttatataacagtttccaaaagactacagtgatagaaaacagataactgattgtcagggattcggaatggaggtgagtgtgacttacaatggaacagaatcaggaaagttttggggatgatagaactattctgaattctgactatggtggtgtttacacatgtgttaatatgcatgtatctgtataccaatataccaaaagggccaatcatgcatattaacaacatacatatgttaatataacagttaatataacagtatatatataacagtattactataacagttaatataacagtaacaacatacgtgtgttaatatgcatgcatctgtataccaataccaaaagggccaattctactgtatgctaattttgttttgttttttttttgagatagagtctctctctgtcgcccaggctgggaatttataaaattgactgattaaaccagaaagaataacattgtattatatcatttattatgtggatagataacaaaatatatacaatgatagcataaaggactgtaagaggagagtagttttactgttagaagtttcttgcattgtataagtagtggcacagtatgtactctaagtagactatggtaagtatatgtgtatataaatacttagaaaaatctctaaaatatacaatgaagttaagctaaatatcagtggataaattaaaatgaaacactaaaaatatctgattaatccatgtgacggcaagaaaggaagaacaaaggaaaaaaatagttgggatgactaaaaaaacaaatagcaatatgatagatatacttaaacccagccataccaataattacattaaatgtaaatgtactaaacattcctattaagatgcagtaatagtcacactagatattaaaagcaatatccaaccatatgctacctataagaggcatactttatatataaaactgcagattgtttgagagtactaagatgcaaataaatattccacacaaagagcaagcctaagaaaaacaactatttgtttgaataacattattagccaattttactgggttaacaataaacattgcatccatacactataaatatgtaacttgtttatgtgcacatgaaacatatattttagatacaatatgctgggacacaaaataagtctcaatgtttttaaaggattgagatcttacatagtaggttctctgaccacaacagaattaaattagaaatcaataaaaataacatgcctggaattatgcaaaatatttagaaattaaacaactactacctaatgcataggtcaaaaaaaaaatctcaaaggaaattgtcaagaaccatgaagggtctgagttcgtattctgtttgcaagctaacaagtttgcctgccacaatttcacagatggtggcagaggacacaaaactcctgagtcagaggtaaagaaattaattgtccatagcacagcaagcagcatgagtttcgtatttacccaagtccctcttacccctccagtcccagtgagagatgtggagctgcccagataaatgctatacacacagtagttttgtatcacatttaaagaaccctaagctaggaaattcagtaggcaaatctgtccaacattttctccagagggagatattatctttattacgttaggcagcaaacaagtcttctctctactccagagaagtgctgtctctattttctaatgatatttgttattcaacctccttgaaatgtagcctaaaactaaagttgccagtgccaatatgtgtaagacaaagaagaattctgtctaaatggaaataataaaatattttgaactgaatgctaaaaaattaggcatataaaaatctgtgagatgcaggtaaagcagttttttgaggaaaatgtatagctttaaatgtttaaaagcaaagtagacttaaaaacaattatctaagcttccactttaaaaagctagagaaagaaaagcaaagtatgcccaaaataagtagaacacttttttaatattttacctgaagtgatatacatttagaaaaaaatagtacgttgaaggacgaaaataataaaaatatggcaaaaatcaataaatagaaaacaagcagtaaagtcaataaaactaagagctggatcttttcaaagatgaataaaattgataaacccaagtgaaacaaataaagaaaaagagagagaaaacacaaataccaacattgtcagtgaaagaaggggatatcattaacacaacttaccaaaactaaaacaaaagagataaaaaatctaatagcccaatatctattaaagaagcagaatacattatcaaaataacttatcataaagaaaactccaggctcacattgttttattaatgaaatctatcaagcatttaaagaagaaatagtgctaatcttacccaaacactttgaaaaatagtaaaggagggaatatgttatatggaccagcataagttttgacataaaacttgacaaggtaattacaaaacaaaacaaaacaaaacaaaacaaaacaaaacaaaacaacaaaaactacagaccaatggtctctcatgactatagttaaaaaagtcttttttttcttttaaacaacaaagaagcctatttattgagggggaaaaaagagacagataggttatagatgttgttatacattatatcttataatttacattttgctttcataggtcacagaaagatgtataaaaacaccaaaagcaatggcaacaaaagccaaaattgacaaatgggatctaattaaactaaagagcttctgcacagcaaaagaaactaccatcagagtgaacaggcaacttacagaatgggagaacatttttgcaatctactcatctgacaaagggctaatatccagaatctacaatgaactcaaacaaatttacaagaaaaaaacaaacaaccccatcaaaaagtgggcgaaggatatgaacagacacttctcaaaagaagacatttatgcagccaaaaaacacaagaacaaatgctcatcatcactggccatcagagaaatgcaaatcaaaaccacaatgagataccaccatctcacaccagttagaatggcgatcattaaaaagtcaggaaacaacaggtgctggagaggatgtggagaaataggaacacttttacactgttggtgggactgtaaactagttcagccattgtggaagtcagtgtggcgattcctcagggatctagaactagaaataccatttgacccagccatcccattactgggtatatacccaaaggattataaatcatgctgctataaagacacatgcacacgtatgtttatacaggcactattcacaatagcaaagacttggaaccaacttaaatgtccaacaacgatagactggattaagaaaatgtggcacatatacaccatggaatactatgcagccataaaaatgatgagttcatgtcctttgtagggacatggatgaaactggaaatcgtcattctcaggaaactatcgcaaggacaaaaaaccaaacgccgtgtgttctcactcataggtgggaattgaacaatgagaacacatggacacaagaaggggaacatcacacactggggactgttgtggggtggggggaggggggagggatagcattaggagatatacctaatgctaaatgaccagttaatgggtgcagtacaccaacatggcacatgtatacatatgtaacaaacctgcacgttgtgcacatgtaccctaaaacttaaagtataataataataataacaaaaagagtaatctatagagcaatgaacattacagattgtgtgctgaatcaggaaagagtttgctttggactatagttaaaaaagtcttaagcaaaatattagaaaataaaatctagtgatattttaaaaagtataatgaccaactatgattactccagaaatacaagattggtttaacatttaaaaatcaaccaatgtcaaaattcaacacatttttaaaaagctttcagaaaactgggactagaatgcaactttcttaaccttataaagagtatctgagaaaaacctacagctaagtcatttttaaaggtgaaacattaaatactgcccctttaagaataaaaaagtcaagatatccactctcattattcttattcaacattgtcttgaaaatcctatctacttcagtaaggcaaataaataaaacaaaaatgcataaaaattgaaaagaacaaagtaaaactgtttttattcatagacttgattgtttccatagaaaatttaaataatctacacaaatatttagcatgatcacatgatacaaggtcgatataaaaaatgtatttctgtgtactagcagcaaacaattaaacatttcatttataaaatttataaaatgaacacttcatttataaaaatttcatttataataacatcataaaatataaatatatgagagtaaatttaacaaaagacatgcaagaccactgaaaacggaaaacattgatgagagaaagtaagaaaaatttaaagagatatgaaatagtcattgattagaagactcaatattttattttttttatttttttgagatggagtcttgctctgttgctcaggttggagtgcagtggcatgatctccactcactgcaacctccgcctcccaggttcaagcaattctcctgcctcagcctctggagtagctaggattacaggtgcgcaccaccatgctgggctaatttttctatttttagtagagatggtgtttcaccatgttggccagattggtctcaaactcccgacctcaggtgatccgtctgcatcggcctcccaaagtgctgggattacaggcttgagccaccacgcccagccagaagactcaatattatgaatatgtcagtttcctataaattgatctatatagttcatacaatacaaatcagaatttcaataagaactttaatagaaattacaagttaggcctaaaatttatatcgaaataaaaataaccgacaatcatcagaacaacttttaatgaggaggaaaaaattggagaagtctcactaactgatttcaacatttaccataaaacatatagtaaataagacaatgtgatactggcataagaatagacaaatagataacagaaaagaggagggaatccagaaggagttctacacatgtttgattcattcggttttcaacaagctgccaaggtaattcaataggcagggagttgatggcagccctccttggagaccaccgaccacagctcttctgcagtgagcagagtgggagacaccctggtcttggaggccagtgcacaagcccctggggctgcttccacttgagaagaggagaccagttctaggccttagggagaaaagctctctctgccttgcctacttctctgccttgcttttctctgaaacagtatgtctccatctttgagtggttactgggcctgagtccataaagagggaaaagacaggctcaggctacatttggtaatagaagccctcccagcagtcctgcctcgatcaccagaggatgactttcgggttggggcctaatgctactacagaactcacatttggtgtatcttccaagctcccaagaacccaaagcttccaagaacacaaagcaggggctgtgctggagcagggttctagcattaggaggtcctaggtctcagctagatgctactaggacctcaacatatctgggcttctgaaaatggatgtgtttgcagggaccgtttctgttctgcaaggtggtttgatggggtgagatggaatatggctgcactgcgttggcaggggaaagcaaagggaagcctggctttcctcctcctgacccagagcaaaggctaggggctgggccacctcaaacactgtgtgcatagcagcctccctggatctcagctaggggtattctgcaccccccaggggactctggcaatgtgcacagatcgttctaattgttacaaccgggagaatgctactgcatctagtggataggggccagggacactgcttaacatcctctagtacacagcatggttcctcacaacaaagaattgttcagttcaaaatgccagtagtgctgaggtggaaatgtgccctgaataaccttcaatttccccttttggaaaatgtgatacatgtatgcgacagaatactagtcagacataaaaaagaatgaaataatatcttttgcagctacttggatggaaatgggggttattatcctgagtaactcaggaatacaaaaccaaaccaaatcctgcatgtcctcacttataagcgggagctaagctatgggtacacaaaggcagatgggtatgatggacatgggagactcagaagggggagggtgggagaggtcagagataaaaactacctatggggtatgctacattatttgggtgacagtgcactaaaagaacacactttactgctatacaatttatccatgtaaccataaaacacctgtacccctaaaagctattgaaataaaatttaaaaaagaaaaatgttttaaaaattccccttttgcccttacatagctacagggaagctacttagaagcggaggaaaggaccctacattagaagtgtgtttacacgtttagctaaatgaccaggaaggctcatgaaggcagcctgattactacttcatctcaatgcaaggctcttttgcttgtttccattttactattccctcggtctttgaacgttgtttctgctctcccatgacaggcagcacacgattgcagtaggttttcatctttgtttattaccatttcccctacaccctcaccgatttccctcccctattaaaagatctggttctctatgagaagcacaagccaggctagggctgcattaataattgattttctacttctctctcagcaagctatggtgtttgactttgaggagtggctttttataaagccacagtgtccttccagcacaattttgagttgcaatgatctttggtaggtgatttcttttttctcttattgtttagctattagcagagtaataatgatcataacattttcatcctttcagatctcgtacaggggatgacacctgtgaaagggccttgagcttctctgatgacatctttgtaatttttttgagctccaccacagcagctccagctgctcattaacccgccactggtaatgaggtttcactgatgcctctggggagtctgatttgtcagggggcagcaaactgtggcctggacgacatgagctacgccccgtccttcccctgatgtgacaatgctgacattttcatggctgagatggcttgcggctctctccccaagcctgcactggattcttgtcactcacctgcatcattccaaaccatgccccatgcccagcactgattaaacacattaggctacattcattcctgagaataccatacagacattagatatgacaaagcatatctacactagtaaggcagtaaaataaccaaggtctatgaagtgcaacagaaaattgcctaacaacatgcacagatgatctcactgaaccatattacctaccattcatatattaccacaggcacagagagcacctggagaaacacagtagcaactgctcacagtgactaccccggggttgggaaggaaggggggaaagttacaaggaactttcctcttctgggttttgtggggtttttttgttttttgctttttttttttttttttgagatggaggttttctttgagatggtgcaacctcggctcactgcaacctctgcttcctgggttcaagtgattcttctccctcagcctcccaagtagctgggattacaggcgcccaccaccatgcccagctaattttctgtatttttagtacagacggcgttttaccatgttggccaggctggtcttgaactcctgacctcagttgatccacccgcgtgagcctcccaaagtgctgggatgacaggcgggaaccactgcacccggccttctactgggttttgtaatgagcatgtttgtggtggaaatgtgtcaactgcctgtccagagacagttgtggtggctcacgcctgtaatcccagtaacttgggagggtgaggtgagagatcgtttgagctcaggagtttgagaccagcctgagcaatgtagtaagacactgtctctacagctaaaagaataaatgagtacataaataaagaaataagctgaattctgaggaggcttttactctccataagaccacctgaagtcaaccctagccctcaagctgttcagctacagcagccaatactttctgttccctgaatccactttggctgggatttctttcattggtggtcactggtttcactaggattccttatatcctgtttctttgttccaggctcagaacaaggagcacctcctcctggaagcttttccccaaggatcactcctaacgactatgcctatgcccctcaatttggccccacaagatgagcggcttcatgttagcctcagtttcattcacacagatatggtttgtctggaagaaaccaaatctttaaggataagaggtaataattagcataacagagaacatctattagaagcttcctaagggtcaagcaatgaactaaatgttttacatggataattttatttcatttttataacatccttaggaggtagatatcattagtttccttgtctgtaaataagatagtaagtccgagagatggtaaatggcacaattaccttttttatcgtgctgctcagcaatgaccattcctttcagaaggaccaccatgcccctcctctgtaagctgttgctggaactgactgccccacaagtttagaggcagagcttacaaccctagcctggccaatcaatgacccccttcccccagtgacatatgattggctcaggtggacatagaattgaagtcagtccattcagagtggatctcagaacattgctagaaaggctagatttgtgcccagaagtaaatgctgcaaaaaaaaaaaaaaatgctaatggccattttgcattttgcatgacaaatgtcaggaattggacagttctttaagaagcaaagtcatcaaatggagagagattccattctgtcataccatttgagccatggatcaagctatatcttaaaccacatctagccctaaactgttcagttgcctgagaccctctgataggcaccagcccccttggaggcctttcttttatttgaccttttgtggatggaagctgggatgggggtgggcaggagcccagtgactatgtaagcacaggactggctatagaaatggaatgaaatagccctaaaggattctttatgaagattatggaagagaagtatataaaagaattaggaagcagaacaacaaaaccgtaaacaaagatagaaatacagctgggcgcggtggctcacacctgtaatcccaacactttgggaggccgaggcgggcggatcatgaggtcaggagatcgagacaagcctggccaacatggtgaaaccccgtctctactaaaatacaaaaataaaataaaataaaatcaaaataagccaggcgtggtggcgccacctgtagtctcagctactcaggaggctgaggcaggggaatcacttgaacccgggaggtggaggctgcagtgagctgagatcgtgccactgcactccagcctggcaacagagcgagatcagtctaaaaaaaaaaaagatagaaaaacaatcctccccatggaccttaaacacaggccacatgctcatgcttcacacacatgactgtgtgcacacacatatcacacagttctcactctatccctcctccctcccttctcccctctctttgtttgaaagtacccaaaggccttctaaccatttccttcatttcacacgcagatgattttataatctcatctaaaaactgttgatatgaaacataacaacagaaatacaaacagtgaatcttgatgaggtgaaaacaaggtgagaacaataaaatagccaaactggagaagactttgattccagcacaaacccttgatgcagaagatcttacagccttcagttaaataacctgtgtggttctgaggacacagagtaccatgaggacgtggacaatgatctagccagtctgtgaagggctcagctgtcacccacccagagacgccattaagagacctgctttcaggcggctgcagggagctctggactgggctccagcctgtgccccaacaggctttagccacgcaaacttaaacacaccttagagcgtgtctacaaaggaaacctgaggtgactgttcatataattctctcctggaagatgaacacgctccaagcacactgacctgaatcacccccaggcccctttcacctcattaggccttgaaggaaactgcaatcctcagctgctcccacctcacagaagcctgttacagggactggtacaaaaacagagaagcggcttggtccggagagctcctctgcacagggctgataaagggaatccaggaggccacacatgacctttcccccaggtcctgcaacaagaatagtttttgaatctgatcgttgcagccaaagtcaggacacagcagaacagcatccctcccttcccactccctggctttgctatgagctacaatatcgcacctttccaaagaaaaggatattggtcatccaggggaagaaaaatggaaatctcaaggaaagtatttctccagaattatcatttcctctctatctagtaagcatcttctgtcctgcacgcacgtgtaccagcggccacgctcttctcctcaacacatattctcttggcttctgggccctgtgctcttccttccagctctctggtcaggctttctcagtccatccctggctcctcttcccctccctgaccctcacacctgctgtggtcagggcctcgttctgagccttcctctcacggcacacaccctcctccattgccctccaagtcatctccttctataaggcctctcttctaagcttattatgttcaaataagtggtctccctcagcactggcatgtcgtgggaaaaccactgggctggaactcaaaagacgtgcatgtgagcccagatcccctgatatacactgtgaaacccagagaaaactcacctgccctgtgatgatccaaactgtcttctgtaaactgatgccaggccacaggattgtgtgaggatagtgacatcacatggctgggtccttcgtaaaagaaaaaggccagccctgtgggggctactctttgcggtgccaggtagtgggccagcagcccctgatgagggaggtcagctgcggccctgtcctgggcaggggacattctgtgaaccaagtgttacaagttaccgtcactactgaaagactccccaccctcctcttccaaataattctgaaaacattttgaaacaaatgattttggaagataaaatatttatgcaaagaagatattttaaaacccctttcaggccaattttctaaaatatttctcacgggaaaaaatgccttttgagaaagtttcaggcaagatagagcttggacataggctgtctgtgctagaaggttcttcatagaaaccctgtgagctgcagaagtctcgatgttaaacaaataattttccagaaaaccccataacgttaaatgggttaatgtgagcactaaaggtatgccagggtccctggacccctcctgcttgcccacttcctcactcctttagttctgggaatccctggggaattcttggtttgggcaaatgaagtttgcaaacattgctctaacttactctctcctttgttgagttaagaaaggagagacgaccagccaggaactgtggctcacgcctgtaatcccagcactttgggaggccaaggtgggaggatcacgaggtcaggaccagcctgaccaatatgatgaaaccccatctctgctaaaaatacaaaaattagctgggtgtggtggcgtgtgcctgtagtcccagctacacgggaggctgaggcagaagaatcgcttgaacccaggaggcgaagtttgcagtgagcagggatcgtgccactgcactccagcctgggtgacagagtgagactctgtctcaaaaaaaaaaaaaaaaaaaaaaaagaaagaaaggagagacgagaaggaaggtgtgtccgtggccatatcgacagtggctcagaacagatcagctgcatcctgggccaccaagctcacatgctacctgctggggcagctgtaggacctctagcatgacagtcacctatggacttctggcaggagtgatgcccatctgtgaccccaaatgcttctcagtcctcaagggacagtgtttgtttaatggcacaggacactcatggatagagggcagaacccaagatttttgctcagaagcaacagaaagagaggctagagatttatatggaagatgaggaccaactaaaacaacaggaaccccaaagaaccagactcagaaaaaggccacagccttgtcagggtgccagagatgcagggaatgacctccaactccttcttctatcctctaatgacccctactcaaatgcaaagttcttgagtcataagttcgtctctatgcagagagaaaaccttgactgaccatcccaccaagaaggaaacctttaaatgtattatggagttgatgtatttttcttttcttttttttttttttttttttgagttggagtcttactctgtcacctaggctggagtgtggtggcatgatctcggctcactgcgacctgcaacctccacctcccaggttcaagtgacttgactgtctcagcctcctgagtggctgggactacaggtgtgcaccaccacgccccactaatttttatattttctagtagagatggggtgtcaccatgttggccaggctggtctcaaactcctgacctcaactgatctgcctgccttggcctcccaaagtgctggaattaagatgtgagccactgcacctggccattatttttcacacttacatattaaaaagtgcaatggggctaggaatggaggctcacaactgtattctctgcactttgggaggccaaggtgggaaggtcacttgagctcaggagttcgaatccaggctaagcaacaaaaggagaccacgtctctacaagaaaaaaaaaaaatcagctagatgtggtagcatgtgcctgcaatcccagttacttttgcctcctttatcagaatgtttcaggcaaacatgcacttggccatcggaaatattccaataattttctggtagttaactttcttaaatttcttaacagccaggaaacttctttactttattctaataattttcccgttgctacaacctgatagttaaggaagttcaaataccttctggaatctaggaatccatttttgcctcagtagatgtaatgactgcatgaaactgttggcgaatgacattctctgagtgtggactccacgtcaatgctgttccaggtgctttgcccatgttgactccatgaatccactcaacatgctggtttcttatcctcattttgcagatgagggaactgaggcacagagtgtaagtcacttgcccacagtcccagaggatgtaaatggcagaggcaggattcaagcctgacagtcttggctctggagccttcgtgcttagccactctttatccccaaatcgctgtcaaccaaggtgagcagcgaccaaaatttgacaagcctgaaaccactgcttgttgcccccgacctaggaccagctagaccacagttactgctgctctgaagacaacactgtcacttcacacctgctcagggcccttcttggcactgatgaataaacccagcctggggtccgagaaatgggcagtgcagctctgaagacacgcccgaagttctctgtcccgagggaggacctggagccgctgtcccagaagcgtgttcctgatggaaggcactcataggctctctgcaggggagacctgccagttctgtttttattgattttcactttgcaaaaaagcctcttaaatcaaatcaaactcactaggaaatgtgggaggttgcaggcgcactgccctttgtttgtctctagtgctttaaaggtgtgtcctttcttctaagtggctcaggaggccaaaagctgtcctgaaagcatacctcaacttcctgccttcacctctgtcaaccttaaggcaattcttgatgcatttgatgttgttgtttcctgccagccacaagtccatgaactcctaggactctaagacaaacagtgctgctgctgcatttctttccttggctgtctgccctctctgctgcagtctaacctgagggggaaagggatttgtggttccaaagacagggtccaactgaaggaaaaggcatcccaagcagaggggtcagcatggtcgcctgagatgcatgcctgggttcctggccctctccttggcatcctaagcagaggggtcagcatggtcacctaagatgcgtgcccaggttcctggccctctcctcggcatggtcgcctgagatgcatgcccgggttcctggccctctcctcggcatcctaagcagaggggtcagcatggtcgcctaagatgcgtgcccagattcctggccctctccttggcatggtcgcctgagatgtgtgcccgggtccctggccctctcctcggcgtcccaagcagaggggtcagcatggtcgcctgagatgtgtgcccgggtccctggccctctcctcggcgtcccaagcagaggggtcagcatggtcgcctgagatgtgtgcccgggttcctggccctctccccggtgtcctttagtgctgaaatgtcacttactcagaaaggtcttttctagatttccactgtaagccaaaaataaaattctgagcccctcaaatgaccgaatgtatctcccttttgaccaagggaatcccagagaaatctggaaaactagtccaggccatgatggaaaaagggcatcagacatgcctagctttggagtttaggtataaccgacaagcatgaacactgaaacagagatattaagactgacaaaatagactgcagcaataagacactgaattccgacctgactgtggcagagcatcgcatgacagataacagatatcaaagtttcttacccccaaaaatgtttctctgacatagtctgaaatgttcctgaaaagctgtctcttgtgggggaaatttgcattctgtagagaatctccttcccttagtaggttttttttttttttggagagtctgacacctttttttttttagacagtgtctcactcttgttgcccaggctggagtgcaatggcacaatctctgctcactgcaacctctgcctcctgggttcaagtgattctcctgcctcagtcttccaagtagcttcaattacaggtgcccgccaccacgtccagctaattttttatatttttagtagagacggggtttcatcatgttggccaggctggtctcaaactcctacctcaggtgatccagccgcctcagcctcccaaactgctgggattacaggcgtgagccaccgtgcccggcccaagtctgatatcttttaatgtccaataagagaaatttaccatctattctctgtgatggctgctacctggaggcttaatccacatgacaagaacctgggctttcacaacccccttatttatatttgagcatttatttctgctgacctcaaactcttcaggcaaggcttaattctttcaaccaattgccaaccaggaatctttgactccacctatgacctggaagcccctggcttccaaaagtccacctttccaggccaaacaatgtgtatcttccatgtattgacttatgtctttgcctgtaacttctatctccctaaaacgtataaaaccaagctgtaacacagccatcttgtgcacatgttctcaggacctcctgaggctgtgtccaaagcccctgggccttaaccttttggtaaaataaacctctaaattgattgagacctgtctcagttactttctggttttcacactcaaaaaatgccgtatctttatgatcttaaggtaagtaaaaatatttaaacagggcacacacatgaaacatataagacaaactcgacaaactggtctatattaaaaataagaacttctgtttatcgaaagagatcattaggagagtgcaaacagcaagcatgagagcagagtgtatactcattatacacatggcaacaaaggcctcagggccagaatgtgtcaaccagaaataataacatcctccccatgtacctcaaattccatgatgaatgtggacagattttgaaacctacaaaatgcttcatcagtataaggaatgacatgcttggtcttcttggtgggtcactgcaacagtcccagatggagccgaggcagtctctccctttcgcatggcaaaaccagggatcgccaccctcccacctatgcccattacctacaagatgccacccagggtccttggcatgtcttttacagaccttcatcctttagtccttgctgtcatctctccccttatcctcaccattggccccatccatgctgagctccagcccccctgagttgctttgccccgattacaccacactcattaacatccctgggccttccgcaagctctttcctcttcccaagatactctttcctccctgcactggcaagccaccacactcagctgaggatttcaggggttcaacaccacagctgctttgtggcctgctttagagaaccatacagacagggactgtataccaaacacgtcagccccactccttggtcttgggaatggatacaaagaaagcagagatgccaccgaaagaaaggaaaaaaaaaataaaaaaagcctggcagggaagttccagatgatgttgtgtgagagggtggtctctcagaataatcccagcagacgcacatgcacttcctgcctttcctatgagacttccctgtgagactgtgacacagccccgaatcctggctttggcagctgacagacatgggtccaagtccaagctctgccagttactagataaatgaccttgagcaaattactccagctccctcagtttccccatcgatcacttggggtaacaaagccaaccctgccactacagacatcagactaagccactcttgtggtttgaagatggtgaggggaatctgttggattctagttgagcacgctgatgactcatcagttcaaatatcacgtggctttcctatttcccgtgtcagttgcagggcctctaaaatggctgtgacttccatcatatgccccattcgtggctgtccccaggcactggaaacaccctaccttcatctgctgtgccaggcatgccggcctcccccaggcttttcagagactctgaagatttcccaggcatgaacaccttgcacatcccagacacagcccattgcttgcagcagatgtagcatcaaacaccctttgtgattctgaggatcataaaaaacattacccaaaaagtttccttttaaataccaatggttttctctgccatgccacccagatttcaaccgtatgcagcttcatgctaagagcttcactgaaagtaaatgaaagggacagctttagagttggctgaagactgtttgtttgaagggagactgtataagctggtataatgtttaattctggatgtctggtggagagatctcttagtagctatgggaagaaaaaatagataggtatttaagggttttgaacttgggaacagagtggagataaacgggcaaatgtgctttggataagtccaaagtgacatgtttgaatacacacacacacacacacaaacacacacacacacacaaagttatactgaagattatagctgaagattcctaaacaagtctaaagcaagcctttcttaaagaagtgtacagttgggatatataactgctataacaaaactcaagatttcaacagcttaacacaataaaaaatggtatccctcctcagatcacagtggttgagccactctcctggacagccctcctccatgtgatgacacaagtgcccaagttccttctgtcttgcagttctgccttgcttggaccttccacatctaccccatgaacccactggaaagggaaggcaaatgagagtttgggaggttccatatgcagggcctacgggagcccatgacacttctgcccacatttcacagaccccatctcacggcagcagtcagacatgagtcccctgtgtacctgggcttggtgaacacataaccgtctccgtcactagaatcactagaagcattcaagctaccaaaaatatttcccttatcatttgatgtctaaccttcactgaccttttaacaaacctgttgaacatctgccctgggccaagcatgttagggcaggagaccagagaaacacatgtgcatgtgagaaggggcggcacaggagtttggggcccaggctctgaagttggaatccacaggctcaaattctgcctccatccctttttaagcaaaataataccatgggcaatcaatctaatctctctgtgtctctattttctcatgggtttagtggagacaatagtgtttatatcacagatgatggtgagaaccaaacaggaaaatacaaacagggtgtaagccctgcccagaactccacagtcctacctcctcctcctgagaccaagggatccccgcaggtggtgaggggtttgcatgtttgttttacctttaaaggtggggaagaaaagcttcctccaggatgctgggctatcctagagacagctgggccaggccctcctaaggccagcatgcaaaggccacagtgaggggccctgtgtaagtcacatatatccaactggttaccagttaccaaccagttattatacccccaatccacaggcttagaagccctgctaccattacctggagaagactgccctaccctgctcctctccacatgggtgtcagccaggatgccctggccctgcctctcctacagcttctctccccatgccagaagcaggcagcctgtaaatgttaaggctcatcttaggatagagctgcccaggtgggcaaccggcaggacaggctttcccctcaaggacgaagacagcctgggaggaaggaatggcagccattctcctgcctgcctggcccaggaagccctgtggtaggaacccacatagacaaactgagttctcctgtggtttttctctgtccatcagggaaaatgccattttagttattgttgttatccacgctattagcataggaaaaggataacatttttaacaataacaaccacatgtaaagcactttataattttcaaatgatttatgccagcatagcggcttcattccttgaagcaagatgtaacaggctgggaatttatgcaccagacattttaagtttcctcagcagaggtgtcagtgacttgcccaggggccctggacagaactgcaaataagggctgctgactcttctgaccaagggcggaatcagggccagaagggatatttggcctcagtatggactacttcatcagacaaattttttctggtccttatatcctttccactctcagcacagctgtccctcaagatcacagataaaaggcactgtcaacgcactattagacaccaggggagaagtcagtgcaagaaggtcaggaatgaggctctggggtcaaagtaaatcaggccaaaggacaatagacattgaacctaccaccctacccgcttcccatcccaaacggataatgagaaagttgaattaggataaccctgggttcctgattccagccaaacctcgatcccttaactcagccaagtgctacactgagtgccagggacaggggcataagaggactgggggaggcctcagccctgcccccagggaacttgcagtctagcaccgactttctattcctgtgtctatcatcaacgttcctccccaaatttccacaaacatccaatcaaaatgtgctaagctgtaaaaccttaagtagaaatttgctcctaatagagtctggaaattttgatattgccctcagcgcagtcaggcaggaaataggaggctacatggagatggaaggtggcttgtgcgagttaactaaggagccgacttggcgcttctgattttctgcagggacaaaacatcaggtatcagggacctttagatacacatgagagaaaccctaccccaaggtgggccttgctgcctcctacaacggaggagcctggaggcatgccggcttcaggcacagtgggatggaagagcatgtgtgtgtttcagggaagcctcctctgtctctcctccccattggctcccctctgaagcagaccctcctcagtggtggcagcaactccagggcacccaacctgtgctgttccagcaaagtagaaaaaaaacaagagtttctctcctagaattcccagcaaaacctggtggcatcttattggtcataactgggtcatgtgctaactccagaatcaatcaaggagggcaagggagtgggatgtgaggactgcctcacacccaccagccaggctcccacttcccagaacctgagaaggggtcacatgatccagacacaaggaacagtgtggtctcccagggacctcagaggtgcctgagcagaggccacatgtcagatatgtggtgcttacccaaggggcagggtcttcacccattctaatgtgtaatcctctgagtgcaaggactctctgaaagtcttggcacacatccaaaacctttcagggttgttgtaaagaaccattacagctgcaggcagcaaaacccctgaaagagggcacatggcaggttggcagctcccctcctattcctctccagagcaggaaccccatttcatcttccaatggaagagaatgctgcaggacccccatctccccccacagccttccctgcttatcaaacacatcatacagccatctctaaaaagtccacaaaacccaatacacatccaagaaaataataattagatatctgaatgctgggctgagtctaaatgagtcacataggtcttgtttgcatcacacaaaataaagttaactgtctcaaaatagagaggaagaaaaaaaaaagtttgtgacatcttttcttctggcagcagccaaatatgatgagcaagtaataaaacaattccatttaaattgcacctgctctcaactccctcgccctctgtgcaaagcagattacattgtcttgttttttttttctaaatcaatgccctgactataatgatgttatggagtattaattaatcctgatgatcactgggagcctaatccttaaggctgctggagttggaccatttcctcctatcctgaaggccaagtccttgcaagaagtcaaagcccattgaaaggattaaatcaattgttgaagcagtgagatggtggggttcaccaattttcttttcatggaggaagattctggagagaggtagtgaaacagatgagtcctggccagaaggcccccaattgctaaacgttagcatgcaactttctttggaactcagaacaaacaatctctctcaacagttctctgcaatatatctctgcacggcccttcagcaatatatcaagtgatttctcagtgtgttttaaaaataattgaatccaggcatattttcacttcagtctcaaagtctcatggtaatctcaacacaaatgccagatcaagtctaacatgaatgattgctgaatctattttttgtcattatttaaaataatatttgacagcaccttgctgggtgaggaaaggcatacatagatatttggctacctctggtaagtacacattagatatacaggtgctcaatcattttgctgggagtttcaactggcataatgcttttgacggccacttggcaaatgccagcattttaaaatgcattaaccctttgacctggtacctttgtttcaagaaatttataccccagatattcttgtaggtatgcagaaaaatagtctatacaaggatatttactgtaacatcaatgtctgcagaggcaaaagacaaagcatcctaaatacccattactgggggaggtgttaaataaatcatagtgcatctaaacaataatatattttacagacattagaaacaaacagtctgctttgtatgtatggatttagaacaaattctaagatgtgcaactaaataaaacagcagggtaaataactgtgtataggatgctatcatttgtcatggggaaaagaaggtaactcatatacatttatgcttgtcaatatagagacagtctctgaaaagattcactaggaactatttacttgtgaaatctttgtcttctgatggagaaagtaaagagacccggggacttgatccaggaagatttgcttttcactctataccctcatgtgcagtgtgagctacctgttgaaaagcctaatttaaacaaagtaaaacaaacataaaaattactgttttattgaaaaatatcaatacatgttcactatagagaaataataaaatagagataaacaaaagaaaagaaaaattggccaaagagaatcctttcatatccttccaggcatgattccaaaaattctgaaaatggtttcatactcttccaaaactatttctatgcacttttaaacaaaaaggggattatactggtaataacatgtttacattatagttttattaagagaattaaacaagtgagtaaagatataaacatgctattatctgctccacactgtcctaagtgacataaatataaacatacatatttataagtataaatgtataacagtaattggctttgtaaatttttttcgcttaaaacattgcaaacaacttttaatgttagtaaatattcatctaaaacatcatttttaagcgaataaactttatttttcagaggagtttcaggtttataggaaaatcaagaggaaaatacagtcttcatataccccctgtctccacacacacaacctcctcactatcaaaattccccaccataggggtgcatctgtgttaattgatggacctacactgacacatcattatcacctaaagtccatgtttacattagggtttctcttggtggtgtacattctgtgggttttgacaaaagtatgatgacatgtatccaccactgtagtatcacacagaatagttacactgccctaaaaatcctgggttcgtctattcattcttccctccctcctaactcctggatatcactgatctttttactgactccagagttttttctttttcagaatatcatatagttaagtgatgcagtatgttgccttttcagatttgcctttttcatttagtaatgtgcattctcttagtaatattcacttagtaatatccacgccttttcatggtctgatagctcatttcattttggcaccgaataatattccattttctgaatgtaccacacagtttatttgtccattcacctactgaaggacattcttgattgcttccatgtttcagcgattatgaataaagctgctataaacatccatgtacaattttttgtttgaatgtaagtttctatctcccttgggcaaataccaagcagtatgattgctgaattataggttttgttttataagaaactgtcaatctgtcttccaaagtagctgtacactttgcattccaaccagcaatgaatgagaattctggttgttccatgtaatcaccagaatttgttgatgtcagtgttttcaattttggccctcctaacaggtgggcagtggtatctcaatgttttagcttgaaattctctagtaacatataatattgaacatctttttatatgattacttgccatctgtaaatattactgggtgagatgtctattcaggtcattttcctaggtttaaattggctgttactttttttattattgaattttaagagttttttgtatattttggataaaagtcctttatgagatatgtcttttgataatattttctatctatggcttggcttctcattctctttacattgtcttccatagagcagaagtttttaattttaatcaagctcaagttatcaattatttctttcatggatcataccttcagtgtcatatctaaaaagccatcaccatacccaagcttacctagatattctcctatgttattttctatgagttttataattttgtgttttacatttaggtttataatccattttaatttttgtgaagggtgtaagcagatagtgtccagattcatttcttttgcatgtggatgtataattgttccagcaccaattgttgaaaagactatcttgactccactgtattgtctttgcttcgtcaaagatcaattgattctatttatgtgggtctatttctgggctattttttctgttgatctacttgtctattcttttaccaaaccatactgtcttaattactgtagctttacactaagtcttgaatccagagagatggcctccatattactttaaaatcagtttgttgatatccagagaataacttgttgagatttttatccaaatttcatttaatctatatatgagttgggaagaactgacatcttgacaatgttgactcttttcattcataaatatggaatatctctccatttatttagctctttgatatctttcatgagtcttgtaatttttcttgtatagatcttatacatattttgttggatttttcctaagtattttcaattttcagggtactaatgtaaatggcactgtgtttttaatttcaaattttacttgttcattgctggtatatagaaatgcaattgacttttgcatattaaccttgaatcctgaaaccttactataattgcttattccaagagtattcttgccaaatcttttagatttttctacggagaggattatactctgcaaacaaagacagctgtatttttttttcttaccaatgtgtattgtatactttttgtgtttttttttcctgtcttatgtttagctgcactttcagtacaatgttaaaaaaaaggtggtaacattctttgccttgttcctgatcctacaggaaaaattttgagtttctcaccactaggtgggctgtatttcttttactcgtttagtggttgtcctagagttttcgatatacatttacgactactccaagcctactttctgataactctgtagcacttcacaaagtgcaggtgctttataataacaaaatattcttaattcctccctctaccccttgatacacattttgtagttgtctcacagtttttagacactctgttctgttttttttttttttcctcagtcttttttttctgtttgcttttgagttttggcagtttctactgttatatactcaaactcaaagaatctttcctcagcttatattatccatctgttcttgcatgttatgtactttttcattaatacccttagcatattacttatgtacatatttgtaaagttcctgggctgataattccaacactcttgccataccagactctgattctggtgcttgctcagtttcttcaaaccgtgtttttgccttgtcgtatgccctgtaatttttgttgcaaggtggacatggtatacttggtacaggaactgaggtgcacagatgtttagtactgcaatggcaaggtgtgtggagagaaaaacatcctgtgataaagtcagcttttcacttgttattagaacaaagtggagacttctgagctccaacctgccagacaataaaccagaagtctgaaaagcagcattttaaatttacatactatactttatccccttcttttatgtgtaatgtaattcttttttcttttaaacaaatttaaagaccaactaaagatttcaagctgacctacttgaatttgcttcacctcttattttccgctcttgtttttcttaggtatagctgatttgattttgcttctgaagtctgactttagagctggagacttaatttggatactgggctaacaagctttacaaaggagttagaggattcagctagcagccattgaaattcaatatatcttgtctttctgaattcccataaaatactttaatgttccattgattgccaactcaactgttttaaccagtacctaggacctacttggcagacagtcagttttgcaagatattatgccatttaattgcatgataatattacattcatgatggtaatataaatgaggcagtaaaaagcagttgtgaataattaaatgtcaaggactaagaaaatacattggatgacactgaagcatggtataactttagaaagacacccttcaatttcgaacacaggcaggcagcgtatttaatgagcagaacctatattcttgttaagtttcactgctagaaccaaacctattttttcataaaggttcaccagtctttagattctgctaaaactcagttggagaatttcttttcacagcttctactgtctaaggtttcacaatataagaaatataaagtttctcctcttctaaagttggaaagttttatataagaattttcttgcgtctccattttcctcctctactgatcacaactccctcctgctacctcatgtcctttggttcccgggcaggggaattcttcagaaaataatccttccaatcactctctgtccttttcccctcaggtctagataagacaagccccctcaggaagccaggacaaagacgtgggagaaaggcaggtagagtggtcaagaaatgttcttttcaggcaggaattggggtcctcagcctatcttggcagagactccagcaagaaaaatatctaattcattcatccaattaagtggctcttaagcacctgcataggttaagagctggaacagaagtggaagggcaaagataaataccttccatccgatttagcagagaggaaaagcaaggatccagggagtgaggcaataaaaaggaggaatctctaattgccaggactcctctttgagcagtcagagccctgttttttgtggggatatgctctgatgtgctgcttgaggttggtgtaggaatgagggtgactctgaaggatcacaagactgacttccagtggggtcagggtgagcaagatggaggcagaagctcaagtgaggataactgtaacctccagtatagaagagagaggagtcagccaaggtagtgcctgctgggaaagagaagagagaaaaacaagcccactcacctccaggaggctggcctagcagggattcagagcacagagacccaagacatggctgcattggtaggccctcctatgtgacaaccctcctcttagtttccacaaaatatctttgtatgagtgttttcttttaggaaaccacaaaatagaattagatataaactcaaacaactgcaagttttagtcaacttgggttgctctaacaaaatgccacagactgggtggcttataaataacaggaatttatttttcacagttctgggggctgggaagttcaagatcacggcgccagccgacccagtgtgtggtgagggctgcttcctggttggcagcttcctgtcttcattgtgctcccacatggtagagagcagaaggagcagctctctggcttcttctcataagggcactcatcccatgcatgggggctttgcccttgtgacctaattacttcccagaggcaccacctccaaataccatcacactgggggttgggatttcaacgtataaagtttgggggaaacataaacattcagtccgcaacacaatacaaagagaatcataagagtcacgagaaacaggcagataaagagacaggctacaagaattcagggggcaaagtggtcatttccagatggaagttaaagacagccttcacagaagtggcattgaagaacagaggagtttcgaggctaggcaaggggagggtgtcagcactaggaagggaatgccaggcatggggaagggtgtcagcaaaggcatcgaggtaggaaagtgcagacctgggcaggtaccagctaggggtcaggtggttttgcaccagctccttctgccccttcccgcaatttctgtggaacaaggtaatggtctattggctttgcacagctaaggcagattctcaggttattcagatatatcctccagaaggaatgtaattaggggacagaaaggcactgggtaactttaatctttctaaagagctgcccgtccctccctggagccaacagctcatttttattcctcaactacttggctcccagaactgattgctgattccggctgtttggcagagggcgattgtgcatgtcctgggagtgctggccagcttccatttattaatggagactaaacttacccctgtctacctcctctcccacttcacagagaaaagttttctcagtctctgccacacacgccactgctttcagagcccaagacagggctgcaccttaagatgaattggattctcactaaaccaccacactctgtgatcacctgtggagatctttgttgaggaatcctgggttcctgcagcagccaaagaaccagcaccgatacctaaatgtgcatagtcattgacatgcttcattttttatcaaatgagactagcgggtctcacacctctcccactttctcagcagcctctcctctttcctaatccagtgcccttccacactctgcagtggcacctacccagttccactgatagccccagacgcagcatacttgagaataaagagcaggcctaaaagaactgcgatctggtcgctgtttctttccttgctgtatgaccttgggtggggcaactaacctttccgagcctccgttagttcatctgtaaaatgtaaatagaatgcaaagttattatttcatacctcccttacaagaagctttttcaaccgtgacactttcagcatttggggccagataattcttcatcatgcgtggctgtcctgtgcatgggctatttagcagcactgctggccagcagcaccccctgaattgcagccattaaagatgttctcaggcattgccaaatgtcccctagggggtaaagtcacccccagttgagaaccactgtcttacaaccaccttgtgagccaggtagaataaagggtagaacatgtccaggtttggcaggacagacatttgggaatcaaagagaatgctctggcagtggtgacatcctaccccacatggcccagggaggggggttctactgataaaaagcagatccaggaaagagatacatgtgagagatgacaagggttttgaaaccagttaagattttctttagcagaaaagacaaaggtctttgtcttttcacctaagggcaaaccctcttcattactgtgaatattaaccttcttccaaagactctgtcagtcgagtctcaccagaggagtagacatttctcttattaacaagaccttggccctgtttcctgcaaaataataactgtagcaccatttgcctaaggaaagaaaagatggtcttgccttgaaggagcttcccataataaactattgaagctaaaatttctactaatactatattgttgtgttatagtataatttcaaaaagataaaaatttgacttttatgcaaatatatgataaatatgtgtcaaagattttacttaactcattaagaggcaaccagcaagacatcaaaactctatcaaatgagaatctgaggaagagggtattttaggcaacttaaaagaacattaggatgagtgctacatgagatgcaaaactaggtaatgctctcagggccagtacccataaccattggggttatctgttctttatttttttcttagggacagggtctctctccattagccaggctgcagtgcagtggtgtcatcatagtttactgcagcctcaaactcctgggctcaagcgatccttctgcctcagcctcccaaatagcaggcacacaacaccacacccagctaatttttaattgttatttttgtagaaatgagctctcaccatcttgcccaggctggtctctaactcctgggctcaagtgatcctcctgccttggcctcctaaagtgctgggattacaggcgcgagccactgtacctggccagggtcatcctttctaccatttagaaattatttgtatctcaaccagaccaaaatctataggttcacttctgccctgtggaactgtaaagtagccctgtcagtagaaaatcaatgagaggtgtcaatccagcaccccccagaaagaacgcccagcaatcccttatttctaagtttgggctaattcttctaatagttacatgaatattgaatgctgccctcccaggccctgggcgaatcacctctgcctctgccttcaataattaaagtctaggagagcaacagacacacaaaagttaatcacaattatgttgccagataaaaatatacattatcccatctggaatttttacacattcctggtgaaaatctacgttggtacaactctttagcagaacaagatatatatatatatatatatatatatatatatgaatgacagggtcttgctctgttacccagggtggagtgcagtggtgcaatcatagctcattgcagcctcaaacttaaattttttctgtagagatggggtcttgctatgttgtgtaggctggttttgaactcccgggctcaagcaatcctcccacctcagtgttctaaactgctgggattacaggcatgggccaccatgcttggccatacttctttttttttaatagtatttttttgtaatgtttaatttttgtggctacatagtaggtgtatatttttatgagatacgtgagatattttgatacaagcatgcagtgcatcacaatcccatcagggtaaatggggtatccatctcctcagcatttatcattgctttgtgttataaacattccaattacactcttctagttatgtttaaatataaaacaaattatttttgattatagtccccctgttgtgctgtcaaatactagctgctattcattttatctgaccatatttctgtacctattaaccatcctcacttgccccgccaagtaataattattaatggagggcagggccctggccctcacctcatgagctgtgaaaacaacataagtcactgtcagagttgatgcaacaagaaatgtagaggcttaaatatataaaagtagtcaaatataaaaactaaacataataataggaatagcacacagaaaggaggagagaggtacttaaaatgccatctgttgatacactggggtaccaagacatgtctaagaaaattatattttatgttgtattttggaggtaacctccagcaatcagaatagaaatggctagaaaggctgtctgcagggtgggcttgtgaatagcaaggaggggatgccctggctatagcaggacacacaggaagcatgctcatgtttggctgcaggagtgtgggaggctccagtgagcagctgcatctcaggtaaggcccagagactgatgggagattgctagtttgtcaactggacagttggaggaaaagctttcaaggtagaaggaacagaatgtgcagcagcccagagcaagaaagagtaagatgttcaaggctgggagatggggccaggcaggtatgggctggaccacagaggccttatgtgatgtacaacaaagtgtacaaagtgtaattttaccctgtaggcatgggacaccaaacaaatgtaattatttttgttgtatatcttattttgcaggaatggatataacgtcaggaaactgagacacaagaatacccagtctcatggaggagacagagcagagatgtttatatatcttctgtcctcacttgccatttctcaggacttatcaccctatatgctagatactaggaccacaatctgaataaaatacagtccttgcttctcagagactcacattctagcaaaaaaataatttttaacaggagagttaatagcagtaccagtgatttaaaacaaacaaacaaataaacagacaaataaaaacaccaccaggcagttcacaatgagaagcagaatgaagcagcaagagcccaagacacaagacatgggtgggactgacagcaggcccctagatgcagggtgggcttcctggaagaggaaggccttgcaagatagtcaaatacagtctagtgcagacaggaccagggcttccaagccagaggcatggcatgggcaatggcattggtctataggactcaacttccatccctcatccccaatttctccttcccgctttccagagcttctataaccaggcttgatgggatgacattgtaagacttaatggaggcttcttccaggccttcaactttcttgaattttctgtctggatcatgtctaccctgagggcagtgcaaagagtcagttcctgacctctgagcttctagaacaccttttttgtttctaaaacagagatctttcagagaaacggctgcttgagaatcaagaactaaggcagcagaacgagcacaggtctgaggagcatatgctttccagatcctcctgcacagagacaggtggttcgaaaataataaaatgaaacggaaattagaaagaaacacctcttgagtggaagaagggcagatattttatctagaattaaaataggtaagctttagggtgagtgtctgagggtaaaaagagccagaacccttcttattctgagatcaaaaccctgggtgaagccgggcacaggggctcatgcctgtcatcacagccgatctgggaggctgaggtgggcagatcacctgaggtgaagagttcgagaccagtctggccaacatggtgaaacctcatatctactaaaaaacaaaaatattagctgggtgtagtggtgggtgcctgtaatcccagctacttgggaggctgaggcaggagaattgcttgaattactcccaggaggcagaggttgcagtgagctgagattgcgccactgcactccagccggggtgacagagtgagactccgtctcaaaacaaacaaacaaacaaacaccctccccccaaaaaaaccctgggtgataagggaagtccataggaccccccagaagtttaggaaacctgacagcataggcgacctgagcttccacttttggggttgcagatgccagagcctgcaggccccccatagaggcttcatgaagctggctgggcagagggggctgtctaggcaggtaccccttgctaaggccccctggagaaagagagagatggggaacaggccagggaaacttgagaagttctgaagttatggagaggacacagaagttctgttgggcggacccaacagaaaccgaggcccatacaggagatgccagcccaagtgtcagacccactctcatctcaggtgacagtgccacttgctcgttcctgacctccctcccttactcctgccccaccctgcagcctgcaccatccacacctgagctgctcacagtgattccctgggggagccacagaattctaaacaagttgagggatcagaaggaaggaagtttaagcttcaagattccctgagtctacctcactgggtacaattaaattttaggtaaaatgtgaggatggaaaacgaattctggttataaagaaaattcctttttttttttttgcatgcccaacttccaggcccatgaaatcttcacctgttaggtacgaaggtctcttaaattgtgctttcacaattcagcctccagcccggggccaaaatcaattgcactttggaaactcctggggtggcttttataagataaaccaatgccaggacccattccagatcaattaagtcaagatttctgggaaaggggctcaggaaatgtgtactttttaattaaaaactccccagtttattataatgaactatcaaaattgataaccagtctccaaccccaaatccaaaaccaatgctccgctgaagtccgtaaactgggcaggctgccctggaggcccactgcccagtgctgctgtttgcaggatttacggctccatcctccaggagtctctggagcacagggtagctctggtgtcactgctctcccatttacagctgtccgtcattgcttctccgccttcccaggtgcagccgtgatcacagcagggccctcacaacctgccccttcctctatgcaatgtctctcatggaagctttcaaattcttgtagcattctgacccctgaatttattgtctattgattgcatgggattcattactttctattgactgctcatgctgctggtattgtggataaatgctaattcctcaataatttataccatatgtggatcatccaaggcaaaaaacactctttttctcccttttatagattttgttcatttccttctggggaacatcatgatccacatgaaatccggaaaatgaatatgtcaaattattttgatttgcagccaggctgacaatgcagcctcggcttcccattgacaccattattggatggtaactcaaggaaaattggggcctttaaggagatgagccaagaagtggggtgctgtccccaagataggggcatcaggcagggttgagatagccttgagtctcccagcaagcccccagccctctaggcagtttctgttctcaccccacaggcccagctttctctgtgctggaaattagaaaggcagtgaacagaaaagttttctttgccctaataataaagaccccccaaaacctgtgttctcatgtccaaaatcctttcccacaaaccaagcttaaagaataccttttttaaaaaaatggtaataaacagaaagtcacggtttagagtacaggctccaaaaaagtctacctgggtctaaatcctggcttctatgtgagctgggacacattacttcacctttccacctttatttcctcaactttaagtcgaggatgctatggaaacgagaaatgacccaccttagcacagcttacctaggagatagtgaacctgaattctatcctccccagcttgagctgcggaagggccatgaactctgagcatcctggagttctagactctgtactgcacttgtctacagttgctctcctgggcaatgcccatggattttgtttaaaccaatgatgttcagacatatggacttattccatctaattcagagtgctggtttccaatccctaatcaacagaactgccatgaactatatgcccttctctcccagcatttcaaaaccacagcttttccctcttagcaaactgcttggtaaatttcttcattggtttgtatttccttcctaactcccagagttcagaaatcaagctgctttgtttctgggtggtctttgttttcatcattgacaatagcagcagtacttctgcaaaggaggttgaaagaattaaataatgcatacgaaatgcttagcacagtacctgaaataaggtagggctcctctcagtgttactcatgagcctggcataaagtagtgtctcatgtctcaacaaatatttattgaataaataaaaatagtcgtctttctttctttctttctctttctttctttctttctttctttctttctttctttctttctttctttctttcctttctttctctctctctctctctctctctgtctctccttctctctttctctctttctctctttctttctttctttcttttctctttctttttttgagacagagtttcgctcttgtctcccaggctggagtgcaacggcatgatcttggctcactgaaacctctgcctcctgggttcaagtgattctcctgcctcagcctaggagtagctagtattaccggcgtgcatcaccatgcctggctaatttttgtatttctagtacagacagggtttcattatgttggccaggctggtctggcactcctgacctcaggtgatccacctgcttcggcctcccaaagtgctgggattacaggcgtgagccaccgtgcctggcctttgttttttttcttttttgagacagggtcttgctctgtgacccagactaaagtgcagtggtgcaaccatggctcactgcagtcttgacctcccgtgcttaagcaattctcccacctcagcttcctgagcagctggaactacaggcacacatcaccacacctggctaaattttcaattaattaatttagttttcgtagagattggatctcacaaggttgctgaagtttatctcaaattcctgagctcaagcaatagtccagcctcagcttcccaaagtgctgggattacaggagagagccactgtgcctggataatgaaggtagtcttttatgcatttcacatccattatctcattcgaatctcctccaaaacttaatgaaacaggttatatagataagaaaaatggaggctcagaggccgaagtggcttgcccataattgcatatgtaactggggttgatttagaactcaagtgtgcaccccaagctccagatgtaaggtgctctctccttcacagagcactatgacttcaggtgggggcaagtatgggagcaagatcacggtgctcacatggcacttccacactctgctttccctccatcccttcccttcctttccttttcctctcatctgtcaaaatctcccttatctaccttcccctctcccattttccctctgataccagtttcaccatggggaaaatgggggactggacagataatttccaaagggaccatcaccctctttgacaggacataagttcttgaggtgtgggtggctgatacccaggtgcctttcctggaagcagacaaagtaggtgacctgggaacacaaaagaccctgaatcctcaaaggtgatgctagaaggtgcattgggctgaggaaaaagaaaagagagactgagggcaagaaagaggaaagctaagcagcaggaggtgcagaggttaagagcaagggctttagaccagacaacacaggttcaaaacccagccctgccacttatttgcagtgtgaccttgaacaagtcactaaacctctctgtgccttaaggtttttattggtaaaatggaaatgatgatgataacagtacccagctcataaggctatcgtggaggtaaaaggaggtcatacaggtaaaggacagaatagtgtctggcactcaactgacgtctatttttattatttcaagtttgctcatggcagtgctttcctgtcaatgatgcaattcactgcttttatctgcaaaaagaaaagactgccaggcatgcccacacattcaagcccccaagaatccaacccttgaccatctctccagcttccatatcttcaccttatacagccccctctctgcttcctcgagccctcaaacctggctcttgttctctctggagctcaagccagttccccgatgttagttcctgtctcccttcaggtctcaacttctcagacaggctttgcctgactcccatagcaccttgactcccatggcatcagactaaatggcatcttcctgcatgaaaatgcaaactccagaaggacagacaacctgcgaggcatggtaacctatgcaatagtttggggctgagttgtttttgtatgtttcttcttaaggaacacacattgacatgcttgcacacccatagggcatgtctgaaggatgcacaaggaccggaagcagaaactgcactaggaatcacctacttttcaccataagccctaggtgccatttaaattacatgtcatggagaattagtacttaatcaaagcaaatccacaaatccacattaaaaaaaattaaatttggaaggccagggttggtggctcatgcctgtaatcccagcactttgggaggccgaggcgggaggatcacctgaggtcaggaattcaagaccagcctggccaacatggtgaaatcccatctctactaaacatacaaatattagtcgggcgtggtggtgggcacctgtaatcccagctactggggaggctgaggcaggagaatcacttgaacccaggagggggagtttggagtatgccaatattgcaccattgcactccagcctgggtgacagagcaagactccatgtcgaaataaaataaaataaaataaaataaaataaaataaaataaaataaaacaaaacaaagtaaaatttggaaactatgatccttcaaacaggataacagtggcaaaggaatttttacacaattggtcaataaagaacagaacaaagagaccagaaaaagacgtagcaagagttgccttggtgttcacactgcagcagtcacccagatccttgcaagcaggctgttcccaacttcctgacaactagcattgctcaggcgatgcttctgtgcctaacctgcagcagccacgggacacactagtacacacttggccaggcacaaaatggcctcaaagtctccaaccacaacactagaaccttaagacaaagcagtgttgatacagtttcagtctgcatccccactcaaacctcatattgagttgtaatctctagtgttggaggtggaggctggtgggaggtgattggatcttgggggtggtagctagtggtttagcaccattcccctactgctgtctcatgatagagttctcatgaaatctggttgtccaaagcatgtggaaccttccccttcgctctctcccttcctcctgctccttccatgtaagacgggccggcttcccctttgcctttcaccttgactgtaagtctcctgaggcctcctcagccatgcttcctatacagcatgcataactatgagccaattaaatacctttttttttaaataaattacccagtccccggtcgttctttatggcagtgtgagaataaactaatatatatctttaaaattccaaaagacaattctagaattctatatacaaccaacctatcaaacaaatattagggtagacttaagattctttcagaaattaaatgcctccaaatatgcacaaatgagacacgcctcctgagcaagctagcagagcttgtgctccccagaatgagggggtaatctatgaaaaggtaagacataaggttcaggaaacatagaatctagcaaaggagacaggtgaaagaaattttagacgcccgtcttttgtcttagcttagagtcccccaaagcagactctgagacaagaactcatgggcaggcagttaaatttagaggcaatcccaagaatctcaatgaaggcatgcggacgtaagatgagcaagcaagaacggccagtgagtggctgacagtgcacaggttcccactgtggggagtgagtgggtgacagtgaacaggttcccactgtggtgaatgagtgggtgacagtgaacaggttcctactgtggggagtgagtgggtgacagtgaacaggttctcactgtggtgagggggtgacagtgaacaggttcccactgtggggagtgagcgggtgacagtgaacaggttcccactgtggtgaatgagtgggtgacagtgaacaggttcccactgtggtgaatgagtgggtgacagtgaacaggttctcactgtggtgagtgggtgacagtgaacaggttcccactgtggggagtgagtgggtgacagtgaacaggttctcactgtggtgaatgagtgggtgacagtgaacaggttctcactgtggtgagtgggtgacaatgaacaggttcccactgtggtgagtgggtgacagtgaacaggttcccactgtggggagtgagtgggtgacagtgaacaggttcccactgtggtgagtgggtgacagtgaacaggttcccactgtggggagtgagtgggtgacagtgaacaggttcccactgtggtgaatgagtggatgacagtgaacaggttcccactgtgttgagtgggtgacagtgaacaggttcccactgtgatgaatgagtgggtgacagtgaacaggttctcactgtggtgagggggtgacagtgaacaggtttccactgtggggagtgagtgggtgacagtgaacaggttcccactgtggtgagtgggtgacagtgaacatgttcccactgtggtgaatgagtgggtgacagtgaacaggttctcactctggtgaatgaatggttgacagtgaacaggttataactgtgatgaatgagtgggtgacagtgaacagattaccactgtggtgactggctaagtcctgctgggaacctgctatatgaggccatttctgcattgctataaagcaatacctgaagctgggtcatttataaggtgagaggtttatttggctcatggttctgcagtctgtgctggaaacatggtgccaggatttgcttctggtgaggccccaggaagcttccactcatggtggaaagcaaaaggggagcaggtgtcccacctggtgggagtggaatcatgagggtggggaggtgtcacacacttttaaacagcgagatctcatgagcactcactcattattgcgaggagggcaccaagaggatggtgctaaaccattcatgagaaatccatccccatgatccaatcacctcccaccaggcctcacctccaatactgggggttacatttcaacatgagatctgggggaacaaatactcaaactactgaacatttaagaactccgtagaacacacttcagaattatcctgacaaggtaccaagggccaaggaatctggattcaaaccctcacaatatgtctgggggctatcgccacccattcccatcctttattgactgaggattactctcttaacctcccagcctttttgggctgagccccatgggccacaggccataagcattaatggcagaaaaagtgctctgacagacacaagtgttcaagataggatggcatcagtaagcatggaaactgctggtggcctctggtgtgtgccaaggggatatgggtggtgcactggcagcatctgctgcatctgataaaatgcaagctcctgaggatgggcctacactactccagcatccagcacaatgcagtcacttagtcctgggtggatgcttggatggatggatggatggatggatggatggacagttggatggatggacggatggatggatggatggatggatggacaaataagcaaaagaacatagttgaaaataggatgaacagtaggtgcctgggaaagaaggaagttgaaaatggagtttgaccttcaggcacaccaaactaattgtctttataattttgagacaattttgctaaacacgtgccgccccaccccacccctcacacacagcttcaaaggtgatggggacactaagccccaagccatgccacaagcttcactcactgttggcctctgtccactcactttaaggccatattttggttagaaactttctgtggcaatgcttgcataaatcatattaaatatattctttgctcaatggtactgtgcaccagggtagctagctgtgccaagacagctgctaaattagaatgctcttaaatcagccgcagatgcctaaatgtttatagctttgaagttcccccagccatgactcctccttctcctcccaccagcctgatctttatgatgctttttaaagccagctgcagggtaagcaatgtttgaaactcagcacagggacagagggcagctgtgcacatgtggggtcaaccacaaccccaaggtgagtccagccccggcctgtgaaggatggcaggaaaatgagggaaaggattctttctcacagcagagtcatggagagtcacagcagaataggccccaggggatatccaggtctagaattctccagctttttctcacccaaggccctgagctcaaacacaaccttaagtagaaaacataaacaaatgtaccaacagggtggaatgaaaagtgattttgtttattttcaaaaaaagcgccagcagcttctcaggctgggtggaagaatgtcaccttagagcaggtctctctgagaagtgtcatgtgagcggccccctctggcatgcagtggaaggtgggggcaccagcaaaagtgggataggacatttggtggcatcgtgcccccggagcggaaggggaggagtgggggaggaggacacatttgcaaaggagccaaggaacctccaggaaggaaaagcatcaagaccaactcttccttctggagctctgacatgacgagaaactctggggggtttggatggtcctcactgagcctcagggccccagaagagaaccgcaaatgagctgagtccagattagcggtggggtgggaggatcagttctaggacatcaggaaaagaaggccacctgggcccagtgttttctctctgagaggaggaagcatggcagtgactgacaggagactcctgctgccgccttagactctaaatgatgctgggttaggccatcgggaagcactgggcttccctgccaggctagacaggtaaatgctcagaaatgaagaggaaagaactgcacctgcacctcaggctgatgggttacgctaaacagatgcaagagaccaggtgggatggctcacgcctgcaatcccagcactttgggaggttgaagtgggaggatcgcttgaggccaggagtttaagagcagccgggacaacatagcaagaccccatatctacaaatttttttttttaaaaagagatgggtgtgagggcaggcacctgtagtcccagctattcagaagactaaggttggacgactgctcgaacccaaggctgagactgcagtgaagtgtaatcgtgccccactacacccctgcctgggcaacaaagacagaacccagctctaaaaacaaatagcaagcaaacaaacaaacaaacaaaaaacccaacagaggcgaggctgagtgtagaagaagcagactttgccaagttagctttaagttggaacccgaagtctaaaggcagaggttgctcactggcactggtcatgtcactgttagatgcccacaaagtatagacacttggaagaaaataggttttactactggagaccctccccatgcacgtggtggaatgcataagggttccagttcttcccctttcctgtgtccacatttttgcatcaaatctgcctaggggcaaaaggaaattccctgatgttggatgcagtcacatgacttgttctggccaatgagacactggcaagcatggcccacatgctacacttgtatggtgcggcttctcagcctgtgcctctaccatcacctgggaagggagagacttagagaagagctgccctgccagaactcagtgccagccacgtgaactgcaggaaccagtggctggggtttcgagccagtggcttttgggttgctttgctatgtagcatttctgtggcaatagctaatacaaaaattcaagaagaaatgggcagaccagtcggcactccagggagcactgtcgcctctctcagctgaaacaatgggctgtcctggagcagctggcagccctctcctgagggcagaaccattaggatggtgtctcccaggccctgcccttaaccctgctcctcatctctgccccctctcccccaaccccagccccagaatccctgtgggccacaccatctgtgcaccctcttctggatattgatccatccccaaggtccctgttattccagagactaggctggaattgcagctgcttcctcagggtattctagcagaagataatggaaaaaacccaacttgattctctaggatatgggtgttattaatgttctcctgaaagcagaactgagctgaggacttgggtatagttggtttctttagaatttgatcccaggaagctggaataagaagtgcagagggtgaggaaggaaagggagagaagctacggtgggtctgctgggttcgttgccactgtgggaaactgaggctccatcctgccggggactgtctggggagctgtagagaaaacacctcagactcatccctctaagatatgggaggctggggcatttacccacaggtcctatccccatggagagctgctgtccctggtatatcaattacctcccaccaaccacagccattcccaccctgcacctgcccttgagggctgagtaagtacacagtttggagaaatccctgagaaccactgagagcctggatggcctgaggtgagaagcttgcagcctgcaaatgaaggcagagacagggcaggaggcagcatgggcaccaactggggctgctacactgagggcccataagacaagtatgttaactttgcactgtgatcttgctagaccttcacagcaaaccctgtcttacgggtaaagaaacaggctccaagcagtgagtgacttcaccaaggccagctagcaagtgatgacttttgtccccaaagccctggcagccagattctgaatccattgttcttacccttggcctcagggctttcccattaactaattaatttactcaacaaatattaattatgatgtagacactgtggtaggtgatatggaggattgccgagtacagttgtacaatttgtgcactgtgaaaaaataccatatctaggtcacaccacaacagcataaaatgctgtatttattattctaattttctagcagatggtaataatgtgccttgttctaaaaaaagtgtactaaaacaatgttccagtagatatatgaagagtcctgaggaagggcccttgtccactttgcagaaaggcaccatctgggctcctggcagccctgtgatcaggggagtacagtgtaagagtgaaacagacacagttcctgctctcatcaaaactgtggattagccagagagccccatgtccgactaaacatgccgcaatttgtatttatgcatatatttatatataccgtggatgaaaagaacctagtagtctttgctcagaaagcctttcctggcctatctccctggaagaaagaagaatgagaagaaactactcaggcaaaaagtgagagagagtgtttcatcaggaagagggaacagcaggggttcaggcaggagggagctagatatgtctagggagcttttggaaggagccaggaaaggagtgagttcaagcgggggcgagggaagaggcagacagggcaggacacgcagggcccttagaacaaggtacgtgactgagggcatgggaagccacaggagggttagaagcagcctcatggcactagcatctgtaccaccattttttttttttttttgagacagggtctcattctgtcgcccagattggagtgcagtggcacgatcttggctcaccgcaacctccgcctcccaggctcaagtgattctcctgcctcagcttcctgagtagctggcactacaggtgggcgccaacacgcccagctaatttttgtatttttagtagagacggggtttcaccatgttggccaggttggtgttgaactcctgacctcaaatgatccaaagtgctgggattacaagcgtcagtcaccacacctggccatgcaccagctttttttcaaagcagcctgacctgctaatttgcaggataagagggaagctgaaacaaggcaaattagcaaatagaagagactttttttttcccctggggtaagaaagggccctgttcttgagttccatgcattccaccagctctgtggagagtcagcagtggtgggcaaagtagcaggcgtgacaggtaagcagtcagtctgggagaaaattggagggaaagcggcggtggtgttgactattgtgtatgggagaagagatagagaaagctaactaggtgatgggagatctcaccaactgcaatttcagctgtccacagcaccctgaaggctgcaaaaccactgaattatgccgagaaactgaaggaaggagaccacagggggttcacaccctcaggtgatgaatctacttctagccctgaatttttttgttttctaactgctattcagagtggagtctggaaaactcccatttgcaatactgagatgcaccgcacacccaaataatacctggagcaggcacagagcaagagctgagttgttagtgcccagctcccctcacctcacttggtctcagaagaactctgggaggtggcgattctctaccaacgatggaactgaggcgtgggggtagggtcattttctaggatgacacagccagtgagtgttccagttgggatctgtgtcagtccagcaggtaagctcttgggtaaacactatatgaccccccgccctcaccacccccaggcctcccccttagtcttctccgaattccagcttaagtcattcctattgtcttctactggagctttttcatctcatcgcaggtacataaaatcgccttccctcttctgtcacaatttgccctcctctcttggattcaaaggtctcccctaggaaaccttccctgatcctgtgtgatggggctgtccgcatagttccacatgtgactgtgtgtacacgcatgtgcatctgaagtaacatgcccatttttcatgaactgagactcaaggaagtcaaatgcaaaacaagtggctggcatggtggctcgcacatgtgatcccagcactttgggaggctgaggggagcggatcacttgaggccaggagttctagattagactggccaacatggcaaaaaccctctctacttaaaacacaaaagattggctgggccatggtcgtgcgcatctgtagccctagctatttgggtggctgagatacaaaaatcacttgaacccgggaggcagaggttgcaatgaactgagatcctgccaccgcactccagcctgggcaacacagcaagacactgactccaacaaaacaaaacaaaataaaacaaaaaaaccaagtaagaatccacaaagaaacatccatgaaattaaaaacaaaatgcaattctcattgagatggagtgtttctaagacagtaggaccttatgtcttgtggaaaaaaaaagactcaggaccccaatgcattctgccataaggaaaaaattaaggtgaaagctgagacaggcaataagttgcctctgcatttgttcctgagcagagctacagaaaaaaggttaaagatgagcttttcttatgtaaactgctgatttactgagcgagagaggacttgtgactgactactccctgcactactcctccttttcccttgccacatgtagattcagtaacgtgaccatgctcttccttttggctctccagcctgctcttcccctttaaatagtgaagccctcagggttatctttggagaaggcacagagcacagactgtttttgggattctgtattcctttcttccaggcatgtccttaaccttggcaaaataaacttctaaattgattgagaactgcctcagatacttttgtttgtctgccctccactctcccaccgtatggacatttgagaaatcaatcccaatgaaataaatacaggctgctgtaattgtggcagttcattaggaatatagaatttttttaaggcttcaaggccaaatacctgctgatatagtcaatagcaaatactaataactgcatgcagagaacagcagtgacagaccaggcaactgcgatatacatgaaggcatattcctcatgaatattcaaggccttcttctaggaagaattaggcacatggttgcctgactgggtaaacaggtgatcagcgtttgcagcagatccgatgtaaaaatatggcagctgatgtcagcattgaggccatatgccagaaaacagtatggggaagtcttcctggtaaaaaagcacctctgaagatcaaaatggccccctaagtgacagccctgagcagtcattttgatatttgtccataacaaagtggggaatgtcaaccaaatggcctgaaggtaatggcaaacaggcataaaggacgcagcttccaggcctggcaggagccaggaggcccaggtctgagtcttgcttctgtcaaaacccttttcatctcctgccctccttctaaggccactgccacctctgatgttccatgattcatgcgtggaggaaatgcacactcctcttccgtaatgctaatgcggcttctggctgtgtggaccgtgcaccagatgttgtgctaagcgcttcacagtggagcacactgctctgacctcgggctccagctcggtgtggaagatgcggttccactctcttatttgatcttcacatcaagaaacaagtctattattcaaattaacattcaagatgcttatagtaaaatggaatggcataaactctgcaaggataaacagccatctccttgctctcttggagcaattcaacgggcctcacaggggaagaggccaccagctgcttactgactttgcttggctcagcaccatgtgcacaggtattgccctatagcactgcacaaacaaagcctgtatgctatactggtggtgactgaagggatttttcgaggcctgatttagcaaccggcattataccactaggcctggcatttcattccaggtcggggtctgcaaacaccttcaggggcagttaaggcatgactggctaatccacctggagggtcacagctatgactgcctcaccttttctaaacaggccaacagtggtgtgtatgaggacaacactcccccaaagctgtacccttacacacacacacacacacacacacacacacacacacacttatacacacacgcacacagtaatacacacactcatacacacatgcacacacaagctcatatggtacataccttgagagaaactgttcttgacaaatcactactacctcctaccatcaatgaacttgagtcctcacaactaggaggaatggaaccccagcccactgggaaaggtagaaactgaatattagagcagcaagtaatttggaataatcttatgactcattaaaccttcaaaacttaaagagatgtttattttacactccacctaaaattcagcagttagcacaccttccatccccttcctcgtgggcaggacagcacagctaatcagcactcggctcttgcctctgggtgaactaaatctgtcttcagtcacaacggacctaagcttaatgagttccatctggtcttcgtggaaagccacctgcaccacacaaaaaggcagggaagtttccctgggaaggcattgggacctgaggctggggggacctctggggctggcaccaaccctcaggtggccttgatctggaggagacagcactgtctcagggcttgtaggggcaccacgtgggctcctgaccatgccatccctcacgtgagctccattctgttccattagaagcctctctagatgcccagctctccagtagccatcttgactttcccctctcctcagctcctagactggtagcccattggagaattagcttgtgtttctagctggtgccaggaagatatctgggtcacctttgggggaagtgattgcagggtggtgcaggatattcctggggggactcgttgcaagggtactgcctgaggaagcatctctgctcctttgcagaccaccttaggtgcagccaggcgccaccctagaggagagaagcattatcatagtttcattggaagaagaagtttccagtgacgttggttgccccttatcccacatcagtccttttgtgtctggaaggcttggacccattgcaggaacatgctctcctatatatggagggtgtggaatgcccaaggggctttgggagtggtccatggtggacctgggactgggtagtgggtggggaacaaggttctgaggtaactgaagcccagacctctaggcagagaggctgctcaggggaacggctgtgggcatgatgagacccatcactatctcatgttctcagcctccatcaccgctgtcaaccctgtccccagctccagactgcttctctgtttccaacactcagctccctccataacctcctgttaacttatgcctcagtctctctctaaaactcagagtactctccctaaaacatctttccctttagcactgccaggctggaaacttcaggggctgctcactgatgcccagacgaactccacatgccttggtcctctgcaatccaggtgccctctgctcccaccgccctgccagtgcctctgccctgccccttcctatgcagaacttgtcacagcccagccctgggcccaccacctccatgaagccttcctggcctcaccactccagcctacaccacttctccctccctagggcctgtcccctgcacccttcccttgttcctgcctcttgataacacttccgggagcatgtcattatcacatgtctttgattctaagactcacatttttttacacgtcaacctctctgaaacagggatgcagcagtaaaaaggaggcccaccatgactagctccatgtatgccaagctcactctgggacaaattttgtttctggtttaaagcaaggatgaccacagcaggggtcagtgatgtctcctggcctgaagcagctttaggctgcaactctcctaaatggctctgagggggaccctgcacaagccaccagcccctcaaagggacagcagggagacattgatgtgtctcctcttctcatcctctattgtttctggagacaaaagaagcccttgaaatatttattggagtaataaaatgtcatttaattccttgagcctaaggaagagtggatgaagacctgttcccaggggttgtccctgagcctccccccgggacatgccaaagctgcctcagataaattctcttaaaagtggaaaatgtctctgcctgaggctgcagagtgatcgctaatggaagaggcctcacctgcttcctgtcaccaccaaaaggttcgtgattttgacagctcagccctggggaggagctggattcaggccgggctgccagtccctcgcatgctagatgtgctcagatgtgtccctggcgattagtgtcacagcaggcaggggcatgagtgtctccaggaaagggcccttccccctgcatgtatcaggagaagtaggactggacgccagatacagcaaaacaagccaagaagccaggcctgggagcaccatggccgttagatgcgggctcttccagctggacagaccggcagttctggatcttaacttcaggcgagtgaggcttaggggagcaggctggctccaggtcatgcaggagcagggccactggccctttaccctgtggggttaggaaagctcaatattggaaacggggcccagaggagacagcatccaggggctgttcatggagaccacaaatccggcctcgggtaacaacaccctctctgcgaagaacagaacccacctacccaggagccctacagccaattccaatagcaaatagaaaccagcatcatcagaaagggccaaagggtgaggaaacagccactttcacttgaggtagtcaggaaggcttcaaggaggattttcagtgcacagagtacaggatgaggagagtgagttttccaggaggagcacgtggcaagagccagggccccatgatacgatgtccccagccctgtgatatgatgtccccaggggtccccaccagcccagcagccactggggaaatatctgcaggtgcatcagggccttggggaggcagcaaggtgggaaagatcaaatggagaccatgcttgtttggcacccacagcccatctcaaagtccttgctggaatgcttcccaagacacccatcagtcttccagaaagttctccctcatgtctatcagcaaaaatcttacactttgtcctcataggttttcaggggcctgaggccactttctagaataaaaactgaatagatgcaaaacacagtggtgtatttattttatgttcaccttttataagtattttcaaatacatgtaagtatcagagtataatgaacccttttatacccattactcaatgtcaataattaccaacattttgacagccctgtttcatctgttattcccacctccatcgccttgaggtatatttaaaattcagcaaataaagacagtttttaagaccaaaaataggaaaaaaatgatctatatagctgatgcttacatgctagttacagaatttgtaaaaatgggtatgcattcatggtgtgcctgaggcagtgcacgccgagaatggaacgtcaatctgagctgctgggtaaacatcttcttactctccatcagagcatccgtgaaactgccgcagagagatgtgcatcatctgagtgtggagccctgcagggatgggaccctcatggctgggacagaccctgccccagccagcccccaagtgcagccaggaccacagctggggtgggaggacaggggctgaaagggaagtggcagtgcttgtgacattagaaccctcctgggctgtcactgaaaaactcctccttccagctctccctgcccctgccagctcacttgcatggtacagaacttggctattagagtcaacgcaccaatcgagcctttcatccagtggcctgcagacactggcatggcaacagaagaaaaaactgtgaaagtctcattcgacttgtcttccttctgttttgaagggaaaaagaaaatgtgtcctggcagtcatcattactgacttggtgaaatatcgtctttaatcttaagatctgaacaacccctgtaggtgggcatttttgttttctgtcttcccacaagcaattagaagtttctgctaagatagttaattccctttttattttcactcaaatactcttaacagaatcatgcagactccacattgtctaattagagagcatttacaatggtatcatgagattataaaacaaatgtgtgatgaaatgtgtgtgaaaatcagagcacggtgaggcctcagagtggtgtgtgtatagacagtgccagcttagatgcgtatttccaaggggtcgttgccacctagcccctcctggaagaagccaatgcaaaagaaagctaacccccaaaatgtagggggttagtggtcctgaggaccctggagccagggagaacaatggcttccgtctcattacatcttggcccttcctgcacatcccatgcaacccaaaaagttaccaagacaggtctcagtaaattcagaggtttattttgccaaggttgaggacgcacctgggaagaagaaacacaagtcccagtaggatttgtgacctgtgctttttcaggatggttttgaggacttcaatatttaaaggggaaagagcgatagaagagagggagggatgaaaaaaggggggagggtaggcagtgaggccagtggttgtgtgctcatgaggctttgcttagtgctcagtgaatctacattttacatgtgaaaagatgggtagagaaacagtcaattatccacattttacataagataaagtaagcatgtaggccgtgcctcacacctgtaatcccagcgctttgggaagccaaggagggagagtctcctgggggcagaggatcacttgatgtcaggagtttgagaccagctggggcaacatagtgagactccaactctatttatttaaaaaaaatcattaataaataattttaaacatttaaaaataataggaagagaaagtaagcatgtgaaattacagctgtctgcctgggaacataaaaaagaaggcagaataggtgactcagctcccaagcttaacttgtcctttggcatagtgaatttggagtccccaaaatctactttctttcacatccacataccccttcctgaagacccagccccaggctcagacacacccgctgggaccctgatcgtggagtaagcacatgtgcccctggactcccagcctgcctggcgccgcctgcctctccatcctcctttcctgctgctcttgtctcgcttatgctctaggtttgcactgcactgggcccatctctctccctttcaacagccaagccctctcccatggagggggagctccagatcttcaggacacactcccctgttttggggctgacttcttgtctttctgtatttggctgaaatgttgcctcctcagacaggccacctgtcagcttttgtcattctctgccccattctgagttacctccacagcgctccccatcatctctgttttctctgctttcacacattctgtattccacactaaaatggaggctgtgtggagaagggaccatgctcatcttactcaggctttgagccctagcaccgggaaaccacagggcccggtacacaggagacacaaggtgaaaacatgaaatgaacgagcaaatgaatgaaagcacaaacagagtggaggcccctttgggagactgccacagccccacaggggagcacgctgcaggtgggaaagcccctttgggagactgccacagccccgcaggggagcacgctgcaggtgggaaagcccctttgggagactgccacagccccgcaggggagcacgctgcaggtggcaaagcccctttgggagactgccacagccccgcaggggagcacgctgcaggtgggaaaggctgcccaacacttgatgtgatcctgtctggcgctagaattagtgaataaaattcaattcaattcagaaaacctttactgaggcttattggggcctgggtggttagaacttgtgcaagctgttatggatccaagatctcctctacgtaggaactggagcttcgtaaggcccctgaccaagccacagagaagattctatcttggctctctccctccccttggctattctttctctgattcttttacagcagtttctcaaccttggcaggattgaggcttggggccagataattctttgtggtggggtctgttgcactgtaccttgtaggatggtcaccagcatctgtggtctccactcactaaatggcaatagcactcccatctccagtggtgacaaccaaagatgtctccaactattgccaaatatcccctggggcaaaactctcttgagaacctctgcattacagacttttcaactcctgatttctaaacatcagaatgaacaagactcatgcagatgggttttaaaaccttgaaattggatgagattcaccgggcagtgagcgtagacaaagaagagtgtgaggagaggtgactcctgtatacatatctccattctgggcctcttcccttgtcacaaccaaactgaggcccacttgcctgatgtggtgcccacagcgaggtttttgccgtgatagaaaaaaaggtgcttacttgcagggtgccaggtgaagacaaccaggcagctattgctcaaatcctggcctccctgacggcttgcaggcgagggtttttaaaggcagggtaaatttcaggaaagaagctacaggcaaaataaaaaatcaaatacaccatggaggttttacattggttaaagcttaaaaaggtaatgtaccttgaagtagggggcttataggttgtaggtagagtcaaagattttctgattttgtaattggctaaggaagagaagctttgttgacaaattttgggttactggaaacatgttaactggctaagagtgattttctttaagccccccaggaacaaacaaagcaatgaagcttagttctcacttcccccttgtgtgcatctggactcgttaggtggggtcggcacctctgaaggacaactcagggatacaggttaaggagcagcctttagtttctatagtgaaaccaaacatctctggagctttaacttcctgggctaccgttttaggctacgatatacttttattttaacaagttgcttatttactcctggggcttctttcacatccacataccccttcctgaagacccagccccaggctaggtgtctgaaatttctcttgaaataactcaggattttcctttatttccatgcttagggtctgcaggcccctaaaagaaggggtccctgcttcatctcaccctgaactccaagatcacatatccgacatccaagctggcatccccacttgatttgcatctcaagctcagcgctcccactgctgagctcctaatcctcctctgctctcctcgccatctctcctggtctcagtcaacagcaacttcatccccaactgctcaggccaagagccctgtggtcacacttgactcctctttctactctcaacacaactatcccatcaccaagtaacccatgggctctggctgcaaaacttcatttattccccccagagttgccaccctgggtcaggcccagtgatggctcatcaatgtcatttcacggccacctaacaggttcccagactttgaagtggctgggtctccaggcggcagctgcaagggaactcctaaaacacagaggaaaccatgccactcccgcctgtcaaccctctatcagcttccctttacacctacaaggacatgcacactcctggccagggcccggaggccctgtgtgatcttcaccctgcctgctgcctgacacactggccctgtgctctcccactttgctcctcagtgtccagtacctgctgctcctcctgccaggctccatccttccaaagatagccaggtgcttgctctcttccttccagtgtctgctcaaatggcagctcatcaggaaggccttccctggctacgttacataaaaagcaacttgctgggctccctcacccccagctgacttaaccagcctaactgttcaccatcggactatcctgaactcactggtgtatgtgtgatgcctcttgcaataggatgtgagctccatgagggcagggactgtattgtgttcactcccgtatctccagcacttggaaaacagtaggcactcggtcaggatttgttgatgagatggtcttttgctttacataccttgacggaatacaaccttcacaaggcactggtcaacaccattacaatgcctccagcctgtctcagagactcacccacagttatgctatcctctccaataccatatgaattctgtctccacctgtccaggaggggcttctggggaatattgtctagaatctgatctgtttttttgatattcttgattgataatactgctaattaattctggatatgtccaattattccagattttccagtactcaccataacttatacccaacattatgccttgaagattccaaatttccccaattttatatgtcatacaggggagacggggttgtttgaggcacagccataaatcactatcgataaggaaatgcaagatgagtagaacaagtgtttttaaactctcgttaggctccatggtcaggcaggactaggcggtgttgcatgcaactaacaaacatcccttagcacaggggtgctttggtctcctatactcatatccaaaacccacccacatgttgacttcactgctggaatctgtaaaaggttggttcgtatctctgtaagatactgatggccaggtggccagcacaggtgggatggccctaacctgcccacctttgtggccatagttgcttgttattatatcaagttccaatggacagatttaacccataaaggttgaccaaaggcaagcaggtcatgaggtgcaaaatatgttaaatacaagtctttccagtgtttcagggctttaaggagatggttaattcaacagaatatcagtcagcagaaaatcagtcctttcctttcagggagagtcacaaaaggatactgtaatggatgacctggaaggcccatgggagaaactatggccatagcctcccaactcttcagagaatttggaaaggaattttaaaaaggaatagcacatgagtcaaagtcatctccttagggactggtctataatgtccctaatgatggttggtttctttagagttcacctttcaagaaacctttcccccaccactatcaccatcaccaccagtaaaaggggttcacctgcacatccccaacttgcaatccacagaatgcacctaccaccccttgacagtgaagcctcttcaccttacttgaagaaggattctccttttgtagaagccccgctattaacctctcacataaggaacccagagactgttcaaaacaggggttggcaaactacagcccatgcatcaaacccaaggctctgcctgtttccatgcataagttctactggatcacagccacacccattcttctacccactgcccatggctgcttcctgctaggacagcaaagacctggggcccacaccatctaagacacttactacccgatcctttatgaaaaaaatgtaccaatccttgtcttagagcagtcagccaaatcaacagacacaagaatgccattgtaaaaacacacagccacgcaggactgctgtcctgtcacccacttccacagttagcacacagaggagagtaggcaaagaagttttgcccatcagcattgtggcagatgctgtgtgccccacagcgtcccctgactcccacctctagaattgaaagttgctttctgcaaacaccctagactctgcctgaaatttttttctggccaaacgaggcaagctgaaagctgccccacaaggctgatcttcatcatagatacatgggtagttggtggataaataccttagctccttcactcttcagttgggctaacacaggtacctccaaaaaaattccttttttgtttaaactaattcaaactggctttgtagcccttgtaatttaagagtcccaactaatctcagtgagcttttccacagcatcttctccaggaattgatcagggaccaagatgcccaacacagagtcactgggcgctcagggctctgctgggacagaaaccccaggtaggcccgttgagcaccatgacagtcaatacgccttggctcaagagaacaatgctggcctccctactcccaccattcaaccagaggctcacacttgatggcaagtctctgtggcttctggggctacgatgagaaatgacttctgtcctccaggagcctgcatgacctgcctctgcctctctccatgcttgaggctgccccagcctccccactcataactctgcagactcactgcctttcttccatttctttcaccaggccaggactttgctctcctgggggactttgcagttgctcttccttctgcctggaacatagtccctaagatttttaaattgctggctcattatggtcattcagtactcagcaaaaatgtcacttcctcagaaaggtcttccttgactaccctgtctaaagtggggctgtcactcctgcccccacactctaacacatcactctgttttaccttccaattagcacttgctactgtgagttcatcctgcttatatgtgtgcttatattatcggcctctaacacagctcatgctcccgaagagcagggacttgtctcttatttactactgttgcccccagcaccaagagagcacattataggtgctacatcaatgtgtgttgggtagatgagtgagtaaatgagtggatagaaggaaagagggaggaagaaaggaaggaaaaaagaaaggaagggagggagggaggaagggagaatagaaataagattgattcctctccagaactgcccagatcttacagcttggggctgggttggtcaccacttgagccagaaatgttttcccataaaatacgtatcaatgagaaatgtattaagctgcaaaagtcaactacaatagctaaaatatatgagattctttttctttttttttctttttgagacagagttttgctctttttgcccaggctggagtgcaatggtgtgatctcagctccctgcaacctctgcctcccagattcaagcaattctcctgcctcagcctcccgagtcgctgggattacagctgcctgccaccacatccggctaattttgtatttttagtagagatgggtttcaccatgttggccaggctggtctcgactcctgacctcagatgatccatccaccgcagcctcccaaagtgctgggattacaggcttgggtcaccgtgcccagcctatttttcttacataataagtgtcatgttaggcagttgctagcatcagtttagctgtttaatggtgtcatcagagacccaagctcctttccacttcattatctttagtgtggtggctctcccagatgtgtcttgcctcatggtcacaggatggctgctgcagctcaaacatcacatttacacacaagcagaaagaagaggaagaggtgatgacagctttacctatctaattcctttcaggaaagcaaaagcttttgctgaaaccttccaccaaccacattatatcacattagaaccagatcccatgacatagctacaaggaattctgggaaactgactatatatccctttcagccccgatagcagagaagcaggtgagaaacagggggttggaaacaggtgttctgttgaaccaaattctagtttgtcactgagcatatccccagcagccatgacaactgaaagagggaggacaggaaacatccagtactgaccaaggagggttaacaaggccaccagagagaaatgtttctcacaccgattccagccacatcgacaacttacaatgcagtgagagtgtgctgaacacaatgatttgggaaaacacaccccaggagtactgaaaccaagttgttcttatttcagtaatctgtgggcttcataattaaatgagatgaaataataatggtgggaaaatgtgtcagttttttttttttttttttttagaaaggctaaataactcactacatttagttaggaagttgttacaagctgttaattattttcagactaggtaaaagaaacaaacctgggagatgtgtctggtgtgttaacacatattatttaccccgaggtgacattttaatagcagggaaaacacgggcggtctcccagccctgtgcacattttgccacaagccgctgtgagcgcataaatcctagctctgtcaacagtaatgaggcccagagagcaggcacctgctggggccctgaaattttttctgaggaaaatgtacataattaaggaattgtgagcactcacctctgatttattattaaaacaacacacctagggccacatttgctccctgactcgtcggtgctaaacagacaagtgattaaacatcagcctcacagggggtcccccacactctccctgcaagctttccacatccgggcccctgttcccagagaaggaaaagaaggtgcgtagcagcacggcagtgagggtgggaagtgcgtgctgggaggcctctgctggcccagctctcagaagagcagggctcacggttaacaacactgactgagatgggccacactggattcagagtccatctctaccatctaattcctgtgtgctgttctacttccgaatctcagtttcctcactggtaaaatagagtggacaatggctcctgctttataaggttgcagtaaggattagatatagccctgggcagagtttccagcaaacagtcattgctcctggtcacaggatggctgccaaaacagctaacatatccacattcaaggcaggaagggcgagaagtgggtgacactagccgtatctgtgctattaaatctacccaaccccttgccaacagcagtaggaactgctatgagcttttctgtgctccctaaggcctaggcagtttcttcatggtttcttctatatcctccacctatgaagattctgttcctaaacccactgtctcctgcaggaagccatccctgaccaaatgggagctcggtactatgtcaacctcagtgagagctaccacagtgtatcttcaaatcacagtctctgtggacacatagtgggaggagatggcaagcacccaccaggggggcctttccccagtactttgttatgatgcctaatagatgccatgaaaagacaccagagcgccagtgtaaaagcaagcccacgtgccaggtggaggaggtcatcatggactgctctatcgccagagccagctccccacgaaggaaggagggtgccccaccctgcccgacactgaagccaggctgctcctcacagtgtgtggctggcaagtgggagctggggagattggcaatgcatcagaaagagtctagacgagggcactgcttctgacagaaatcgctcccaggatgctctagacaagggcactgcttctgatgggaatggttccctggatgttcacctgggtaagggctcacaaaggcttctccatctctacctggggctcagggttggtgtgagacagagaaaaacgcatgaggcctgatcctcagggtattgctccgtggtagctgcgtggctcatctcacactgggtagcccaggaggtgagtgctctctgagctggcaggacacaaaggtggcccttcaaaggctgggaagtgagggagggctgctagggacaggagggactggagggacagtgattccaaaaggcaggaggagggctagggaacggaggtaaacatgggcaggctgggtccataacactggatttcctcaactctaagacatcaatttggggatgatctttcaaaactcatgcaaactctcccttaaatgacacaagggtaaagtgcatcttaattccagaatctcctgatgtgggggtggagtcgagagtggccacacctgcatcaggcacttcttgtccccatctctggtgcacgtgtgccctcatctcatcttcacagccaccctatgagggacaccattgccagttctattttacacgaggaagctggaaattggggcttggtgatttggtcaaggccttctgtagccctcgctagctggagttcctgcaaggctcatgggaggcaggggctgtggatggggcaggtccagttgagggaagaagaaaggtagttgcccaggccctggccatcatcatcacccacctgtctcctcctccactcagcaatcagggcaacctgccttccctttgcacttgaagtgaaatccaagcaccttgcacaactgaaaagttcttatcccacacggcctgggccgctccccaccatgtcctttctctcttgaaaagaaaggactcagcctctagtcattcagcccatggcctgctgaccttccaattacagtaacattagtctcctctatttccttcttagctctctgaaattgcctgtttcatttttgtttgcttgttggctccctctggccacacacacactggaatgtgagccccaccacagcaggggcttttgtctttttctcactgttgtacaccttgtgttctccaaatgcaaaagtccaccccacccccagggggtagcatgccttaactttgaaaacgtcacccaaaccagggggcccagtgggacctaagtcagaagcaaacagagctgagcagtgtcccagaggctcgtcctggcctgtgcagatgacccatctctaagcccttcttccctgagaatgagacgcttcctaagtgctcctttcctccctctgctctgcaacttcagacccagttcttctctgtcttgtcctgttaggagtggagctcaggtgcctctccatgtccatttgtcttaccacatcagaggcagcctcttcatcagcgatggcatcccaaggccgctcagcattcccagagtgatagaaactactagaaaagtagttccagaaccttctttcagtggaaagccattggaagcttgtgaccctttcaggacatcagttaacatgtgcttagagaggcctggcctggctcaccttggggtttatgagagaagatgtagtcctgcctttggagaagtcggtctccttagaaaaccaagactggtgcttgcacagctactaaagatgcattcagaattatgttgcctttaaggctaaattgtgaaataaaaacagcaggtggctgaagagttcacaagccacggcgggctggaattgccaggaagggcttctcggaggaggtgggagagcacacagcctcagccctcacagacttacaaggatgaattctctgggagaggaaggtgcttctgagagcataattgaagtcttgatgatgttgaggtttttccaactcgcccataggttttttgttgttgttgttttattttctaatacattttacaactgctacacatgtcgaagtcagagatgaaaacttacatttcccaattaatgccactaaaacgtcattctgacagttccatcaggcatctacagtttcaagcccctcccagcttcggggagctgggagagaagggcaggagcatagcccactcccatgccttaactggccccaaggatgggtggggtttgcaaaccataatcagaagtggagagacaggagtgcttcccgggagaaggaactcaatgggtaaggaaggttccacagatggaaatgcataaggaattcacgggaatcttactgaacatacatggaagcagcaattcctattcaccaagagccctgttgcaggtgctgggggagaagcccccactgctgcagctgtgtcaccgcacagcgtttttctctaattcctctgcaaatgcagaggctccgtcctaagattactactcactgtgattacagacaaaaactctaatgtgcattcgacacttgaaaccctttatttcatcagatcttcaaaacagccccataaggagcagaatctataagctgaagagactgaggctcagagaaattgggtggtttgccctgggtcacacagccagcaaaagcactggactctgcctggcattcttctcttccagccccctcactacgctccccgcagaggcctcatcccgctattctacctgcagtcctcaccagtgtacacactgaatccaagtatcagactgaggaagtaatctttttttatgcagtgtttccccattacaaagtgatattgccttgtcttttcatattccattttccctcaaagctctatcattaaggaatatgttctgacttatccagtaaagtgtttaaccttttttaatgttttattgattcttaaagcttcggttcccccagaagatcctgattgctacattaacaatgtcattgatattcttttaacaggccctctgcaacataaaatgcagcatgggaaagatgagccccaacgacctgttaatcaatgagctagtcttgcatccacctgctgcacgtagcaggagaatgggtggtgagaagatcgactctcaggttccggcaggggctgtgacatccaaggccagacagctgggctgcccgagtgtggagcaaatgccccctttggaggcagttggtggaagaggaaagcatttttctccaggctgctccctccaaccccttacaaccaacctggttttcacaaagccaaattcagcttcaagggcagccatgcattaccctttcagcagagttgagatataaagtcccaatacttttttttcctgagacagggtctcacttgtcacccaggctgtagtgcagtggcacaatcacagccctctgaggtgcaagcgatcctcccacctcagcctcctgagcatctggagctataggtgtgtgccaccatgcctggcttttttattttttgtagagacagggtttcaccatgttgcccagaccagtctcaatctcctggctcaagtgatcctcctgatttagcctcccaaagtgctgggactacagacatgagccaccacacccagtcaagtccaaaatctttagcaaggcatgcaggccctcatgtcctggcttccactccacctggcagcctcatctttcttcactcacccttctctgacatctatgctgcaaccacacccacctaccaggattagggtaaggcaagggaagcactcgcctcaggggcaaaattaaaaggggcaacaaaaaactcagtgatcaagacaaatgttattttaatgcaatattttttaaaaaatcaaaatcagtgcaaaagatccatggttaacagataccagaagttaaaataaagacatgatctgccctgcactcacatgttccagcctcacctgccacagtcgaatcctggccccacctactccttctggtttaccaaactgtactctttctcacctcctgtgccactttccctacctagaagactcccctgtaaatcatccttcaggcatgagctgtgatgtcacccttttcaggcaagtcttccttgacattcacaataactacccacacacgcacatgcacacacctgggactcaagcccctactctgtgctcccgtaacaccctcctagtattcactatatgcgatcacaattgcctggctgtctccctgacccatctgtaagctccatgaaagtggaggctgaacctctactgttgctgtcaccactgtttccagagctggtggcaatggttgggattatggctgcagcgacagctcctctgaaggctgcctgcaccaagtcaggctgggcccacacggagacagatccctgggaagtcttgatgggctggggacctcatgcaggctgctggctcctccacctgaaaccgcatctacagatgctgtgagattagggttgatggacctgaaacactgaaggagacactgacagacatccaggaaacacagaagtttgggtcccgacgtgagagagacagcagcccaaaggaccaggtgtcattttcagggacaggtcagggacggctattttttttttgccagcctttctctgggtggtctgtgcctgtccatttattcttgctgggatattttctgtctcgcagtggtagtggtgaggcagtcgtgacaaggagcctggctgggtggggggagacagagtcagatgcaggtagaccagcaggccttgtgcattccccgcttccccagcccacctccctcccactcctcaggtttgggtgattacagccaaggatgacagctcttgaaacggagagggactaggacaaaagtgccgagactttaataagataaggtgggaagtcaaagggagaatggggctgataagcctgggccatctctaccacaaagcaccaccccttctcctcctaaatcgcctgcccctagtcctcctaccaaccccttgctaaatttaccagaagagacatgagctagggcttgggctttagcccaatatatactccatggtattcacttagcagccaaggtggctgattaccccagggaaatatgaactctgggaggaaagataacgagacaccgaaggatgttcctccataaaagaaagagtatgacacccaacaacctgcactccactgacaaagactctctcctcagccaatctccagccaggctcctctgaaccctcttctcgtccaggcctcaaccaaacgctcacagggtttcttttttcttttcttttctttctttttttttttctggggatggagtcttgctctgtcccccaggctggagtgcaatggcatgatctcggctcactgcaacctctgtctcccgagttcaagcgattctcctgccttagcctccccagtagctgggattacaggcacccaccaccatgcatggctaatttttgtatttttagtagagatggggttttgccacattggccaggctggtctcgaactcctgacctcaggtgatcctccagccttggcctcccaaagtgctgtgattataagtgtgagccactgcgcccagcctgttcacagggtttctaacagctcaaggccatatccctaggatgaccctgggcccacttaaagtgcccacctgagaaaactcaaggctgccaaaaagatttactgtttttttcagccaacacctgaagacaatatagagtctctgtctcccgctctctgaggaaggacaggatcctacctcagtaactgccagcctcagccacaggtgacctagttgcatttacacagtctgcatttttcacttccctaactctgctaagcttctgctttcccatccctatgccctctctgtctcttaaaacacctgttcccctctgcacaaatcaaagaatcattcagttcttgcggaactcttttccctactgcaatagttattgctgattaaaatctggcctcaccactttaatcagtgtccagctttgtttatcgttgatattcagaataatttatgacaagcataataaataaacacaaaaacatgaaaggctactgactaagccattataaacaagatctaattagaaatttggagaatggaaatgagaatgatggaaatatagagctcaatagacgggctgatggtagagtagaggggcagtgagtcagaaggccatgtgtttcttcaaaataagacccattgatcagcatcccctgggaactcaccccagaccgcctgagttagattgtgcctttaacactactcccgggtgaagtgtatgcacagtaaagtctgagaagcagtgatatggttctcagccttgactgcatactggagggatctgggagctttaaaaagtacttacactttggtccttactgtcagagagcttctgagtaagtagcttggggtatgaaactgtaaacgttcccctggtcattttaacgtgcagccaagtttgagaaccactgacttagactcttagaaaagggatagggatgcaaaatgtaaaaattacaggatgtggggcacagaattagaagaatcaacatatataggacagaagtcctacctggagagacaaaagaaaaaggagaagagggaatactttctgcaaaaaaaaaaaatgactgaaaatttccaagaataaaggaaatgttcaagaccgtatgatgatatattgaaagaactcatagagtgccaataaggaaagatttttaaaaattcacacagaaaaatataggctgagtgtggtggctcacgtctataatcccagcactctgggaggccaaggtgggaggatcgcttgaagccaagagtttaagaaatattacattgatatttgggaatattaaggacaaagagaaacctttaaaacttcagagtgaagaggtagataccaagacaggaaaaagaactaaatgacagatgtctcaacagccacacccaaatgtcattttggtcttttcatatatttaaagtagtgaagagaaaaaaaaattaactcagcatttcttatccagttaaactatcatttaaaaatgagggtggaatatccacagtggtacaaggcctcagagggtttgccataaaagaccacctctgaaccacctgtgtcagtccgggtccatgggtgaaacagagctggaagctcaagtgctgcagtggggaaatggaggagaaagatcaggcaggggcggcaggggagcagctcacagactgttccttcggcccaggctccaatatggctcagcacagtgctgttgctgatgccggctttatttaaatatgtgagatttgattcattatggattttgcattaattttgatttttcaatattatttgtctttgattgctcagttttttgatacccccttaaattttgctcctgaggcaaatgccccacccacctgaccctctaggcctctacgatagggatatttgcaaaaaaaccacctcagttaatcaatgctccaacccaggcaccatccaggttcatggttcttctctggttgtgaaaattaaaaaccgggccaccacccacttctcagccttatccccagccagccagcagagcattgtagaatgtgagcttgcattgtgaacactctgaaaatgtaggccagagaaccttctggctggagatggctcctgctgcgagaagggaatatgacagatagcataagatattacagtaattttactgacaaagcactaagcatatcacaaaagaagttcaaaatcaattcatctgcttccaagcagaagcgagtctaacaggcagtgaagcatcatcttgataatgtagttgttccaaaagaagaaggaattaaccaggctaccctaaatgtgtctgtatgacatgcttttttgtttctgttaccctgataaggacttaaaattccatttgtatggaaataaactaagcttccgaagttatcttcctgttccggggagttatctcaggaggtttgctgcagaatttttctctgactaaatgggatcttaggctcagaggctgcaaggtttcagcttttgttgttaaatagtaaagcacactctacttccagccactacaactgtgcttctttaagggcggtatccattaaggttgtttgattacaaacaaagaaaactggctctaagcaacttgctatccttccaacaagttctttttctacttaatattaactaaagaatcagctgagcaggttaaaattagaatgggaaccgtgcagcgcattgggtggtagaaaatagttgacaactctctcagagtttattcattccaacaatagaacccgctgcaaccattcttttctgcattctctacaattttttcattttttttttagtatgatgttttgctatctagcattctcccctcaagactgaaagtcccaagaaaatgagtccaattgtccatgcttgagtcatatgcccatgctagggtgacaatctcaccaagatgttccttagtgagtgaggaaagtttgccaaagagacatggcagtgctgttccaagaaaagaaagagctgggtgctgggtgggcaaggaccacagaggaactaagaagagaggctatttctcctactgtcccatctccaaagaaaaggaggaagtaaaaaccgaaaaataacagactgattggcgccagtggccaggcctgtaggttaaagattaaaccccacccaaaccgcttgtgctatctatagatcacagacaacggtatgaagaaatacttgcattgctcaccacccccacctagtcacgtaccccatgcttgctggatctatcatgaccctttcacgtggaccccttagagtcgtaagcccttaaaagggccaggaactctttcttcggggagcttggttcttgagatgcaagtctgtcgacgctcccagcagaataaagcctcttccttctttaacctggtgtctgaagggttttgtctgtggcttgtcctgctacatttcttggtttcctgaccgggaagtgaggtgattaagggacagtggaggcagccccttaggcggcttagccttgccctgcggagcatccctgtggggtactccggccagcttgagcaatgtggatcctgagagtgctcctgggtaggcatttgccccagtggaatgcctcatcagagtggtgcatggcaggcccccacggaggatcaacacaggggctgaacactgggaaggaactggcacgtggagtccggacatctggaatatggtaggaccggtcccaggaacttacccaccccatttgagtggaagcatggcctgatcacccatggtgtgcccttattggcactttggtctcagttttgattttgatttggctcggcttgtttgaaaaaaaggaaagtgaaagtgagtgaatgcttgtttgggatgggcaacagatagacagtggttgccgtccgaagtgagtgttgagccctgagctgcagttccgtaggatacctcgtacagctaagtggcggttcgtgctggtgcctggtaccagcctgcctaagaggatctgagattcccgcaagggaagtggccagtgtcaggcgaggcaagtgagtgacccctttaccctttcccttcttgtgttgtgagcattgtttttgtctggcgggggtgagggtggtggagatgggtgagacgcaaagtaagcccactccattaggaactatgttaaagaatttcaaaaaaggttttaatggagattatggggttaatatgaccccaggaaaacttaggaccttgtgtgagatagattggccagcattagaagtgggttggccatcagaaggaagcctagacaggtcccttgtttcaaaggtatggcacaaggtaactggtaagccaggatacccagcccagtttccatacatagacacttggttacagctggttttaggccccccatggtggttaagaggacaggcagcagcagtactaatggcaaagggacagacagccaaggaagaatcctgctccacccgccaagggaagttggctcctaaagtcctgtccgacccaacatcagagaattcatggcaagaaatggtgccagtagcccccctctttcaccaagaaggaaggcctccccctcctgagtccactgagcctgagcttccacaagacctacgtacccctaggccacccagagtagaaaagaaaggatgcgagaccttgggagaaacccctcggttggcagcccgtttgaggtctagaactgggatacaaacgtccctgagagagcaatggtatactggggtagacaaggatgggcatatggtggaaaggcatgcctttgtgtaccaacccttcaacgctgccgatctcctcaattggaaaaacaataccccatcctatactgaaaaacctcaagctataattgatttgctccaaactattatccagacccacaacactacttgggctgattgccaccagttgctcatgtacctctttaacatggatgaaaggcgaagggtgctccaagcagcaactaagtggctagaggaacatgttccggctgattaccaaaaccccaagagtatgtgaggatccaattaccaggaacagatccccagtgggactcaaatgaaagacagggtatgcaaaggctaaactggtacagggaagcccttctggaagggttaaaaaaagggagctcaaaaaaagggagctcagaaggccacaaatgttaacaaagtctctgaggtcattcaaggaaaagatgagagtcctgcacaattttacgagagactatgtgaggcctattgtaggtgtactccctttgatcccgacagccctgaaaatcagcgcatgattagcatgactttagttagtcgaagtgcagaagacattagaagaaaactacagaaacaggctgggtttgcaggcatgaacacttcagttattggagatagccaaccaggtgttcgtgaatagagatgtggtaagctgcagagagaaccgcagagagagcgaacgccaagcctggtgaaataccaacctgctagccgcagctattagaggggtccccccaaaggggcgagagaagggggccccgggaaaaatacccagtctggccatccacgtttgcagtgtaaccagtgtgcttactataaggaaatagaatattggaaggacaagtgcccccagttgaaagggaaacaaggtggctctgagcaggaggcctcagacaaggatgaagggaccttgttcaatctggcaggagggttaccggactgagggggaccgggctcatgtgcccccaaagagcccatggtcaggatgacagtcgggggcaaggacattgggtttcttgtcgatactggtgctgaacactcagtagtaaccacccccgtcacccccttatccaaaaagactattgatataattggagccacagggatttcagcaaagaaacctttctgtttccctcggacctgcactgtggaggggcataaggtaattcaccagttcctgtacatgcctgactgccccttgcctttactgggaagggacctacttagcaagctgagagtcactatctcttttataaagcacagctctttacagctaaagttacctagaatgggagtcatcatggcccttatagttccttgggaggaggaatggagactcttcttatctgagccaggccaagagataggacaagctctggctaagcggtgacgaacagtgtgggtggaagataaccctccagggttggcaatcaaccaggcccccatactcatagaattaagtctggggcccagctggtcaggcaaaagcagtaccaggtccccagagaagcccttaagggcatacaggtccatctcaagtgcctgagggcctttggaattatagtcctttgtcagtctccatggaacactcccctcctacctgttcccaagccagggaccaaggactacaggccagtacaggatttgcgcatggtcaaccaagttacagtgactttgcatccaatggtacctaacccgtacacattgttggggttgctgccagctgaggacagctggttcacctgcttggacctaaaagatgctttctttagcatcacactagcccctcagagccaaaaactgtttgcctttcagtgggaggatccagggtcaggcgtcaccactctgtacactgggacccagctcccccaagggttcaagaactcccccaccatcttcggggaggcactggcttgagacttccagaagtttcctgccagagacctaggcagtcaggtgcaccaagggaatggataccctgtttcggcacctggaggactgtgggtataaggtgtccaagaagaaagctcagatctgcagacagcaggtacgttacctgggatttactacccaacagggagagcgcagcctgggatcacaaagaaagcaagtcatctgcaacctgctggagcctaagaccagaaggcaggtgagagaattcttaggagctgtagggttctgcagctcctaagagctgtggatcccaaagtttgtggatctcaaattttgcagtattggctaatcccctgtacggactcacaaagagaggagataaggaaactttcaaatgggggtcccaacagcaacgagcttttcatgagttaaaagagaaactcatgtcagccccagccctggggctacctgacctaacaaaaactttcacactgtatgtgtcagaaagaaaaaatgacagttggagttttaacccagatggtggggccctggccaagaccggtagcctacctctccaaacagctagatggagtttctaagggttggcccccatgcttaagagccttggcagcaactgtcctgctaggacaagaggcagataagctaactcttgggcaaaacctaaacataaaggcccccccatgctgtggtaacactaatgaacaccaaaggtcatcattggctaacaaatgccagactgactaggtaccaaagcttgctctgtgagaatctctgcataaccattgaagtttgcaacaccctgaaccccgccaccttgctcccagtgtcagagagcccagttgaacataactgtgtagaggtgttggactcagtttattctagcaggcccgacttccgagaccatccttggatgtcactagactgggagctgtacgtggacgggagcaactttgtcaactcacaaggagagaggtgtgtgggatatgcagtggtaaccctggatgctgtcattgaagccaaatcgttgccccagggcacttcagcccagaaggccgaactcattgctttaattcgggcctcagagctaagtgaaggtaagactgtaaacatttacactgactctcagtatgcctttttaactctccaagtgcatggggcattatacaaggaaaaaggcctattgaactctgggggaaaagacgtaaaatattagcaagggatcctgcaattattagaggcagtttggaagccccaaaaggtggcagtcatgcactgcagaggacgccagtgagcttccaccttgatcaccttggggaactcctgagctgactcaggggctcaaaaagcagcatccaccccctcccgggcatcagtcacagcccccctgctccctcaggcacctgaccttgtacctacttactctaaagaagagaaggactttctccaggcagagggagggcaggtgatagaagagggatggatccggttatcagacggaagaatagctgtgccacaactgctaggagccgcagttgtactggctgtgcatgagaccacccacctaggccaagagtcacttgaaaagttgttaggccagtacttctacatcttgcatctgtcagccctggccaaaacagtggtgtagcagtgtcacctgccggcagcacaatgctaggcaaggtccaactgtcccacccggcatacaagtttatggagcagcccccctttgaagatctccaagtaaacttcaccaagatgcccaaatgtggaggtaacaagtatttgctagttctaatgtgtacatactctgggtaggtggaggcctatccaacatggaccaagaaagctcgtgaagtaacccgtgtgcttctccgagatctcatccctaggtttggactgcccttacaaatcggctcagacaaccggctggcgtttgtggctgacttggtacagaagagagcaaaggtattgggatcacatggaaactacatactacctactgaccacaaagttctggaaacgtggagtggatgaatcagactatcaaaaatagtttaggtaaagtgtgtcaagaaacaggattaaagtgggtacaaggtctccctatggtattaagattagatgtaccccttctaaaagaacaggatattccccttatgaaatattataccataggccccctcccatactacagggactccgaggcactcctcgagggctaggtgaaattgagttacagagatagctacaggctttaggaaaaattacacaaacaatttcagcctgggtaaatgagaagtgccctgttagcttattcttcccagtttaccctttctctccaggtgatcgggtgtggatcaaggattggaacgtagcccccttgcggccatggtggaaaagaccccagaccatcatcttgaccactcctacagttgtaaaggtagagggaatcccagcctggatccaccacagccatgtaaaacctgcagcacctgagacctgggaagcaagaccaagcccagacaacccttgcaaagtgactctgaagaagacgacaaacccttctccagtcacacccggaagctgactggtccacgcatggccaaagcataaggaaactcaccatgagactcattttccttaaattttgaacttgtacagtaaggacttcaactgaccttcctcagactgaggactgtacccagtgtatacatcaagtcactgaggtaggacaaaaggttgttgcagtcctattattttatagttgttatgagtgtaccgggactctaaaaggaacttgtttgtataatgctactctatacaaggtatgtagcccaggaagttaccagcctgatgtgtgttataacccatctgagccccctatgactaccgtttttgaaataagattgaggactggcagctggggaaaagctgatatgagtaaataactggaacagaagagaaaggagccccaaaaaaattatcttaaaatttgatgcctgtgcagcaatcaacagtgacctgtatggaaataggataagatgtggctctctagattgggaaaggggctatatagtagaaaataagtatgtttgtcatgacttaggaatgtgtagtgatgaatgtagttactggtcctgtgtcatttaggccacctggaaaaaaagataagagggaccctgtccaccttcaaaaaggaaagagtaactcttcctgcactagtggtcattgtaacccattagaactactaattaccaatctccttgatccctgttggaaaacaggagagtacgtaactctaggaattgagggaactggactggatctccgagtaaatattttaatccaaggggaggtccacaggtgctttcccaaaccagtgtttcagaccttttacgatgaattgaatctgccagcaccagagcttccacacacacacacacacacacacacacacacacacacacacacacaaagacaaagaacttgtttctccagttattaggaaatgtagctcattccctcaatgttacttcctgttatgtatgtgggggaaccactatgggagaccaatggccttgggaagcccgggaattggtgcctactgatccagttcctgacataattccagtccagaaggcccaaattagcaacttctgggtcctgaaaaccttgattattggataatactgcatagctagagaaggaaaagacttcaccatccttgtaggaaggctcaattgtctaggacagaagctgtataacagcacaacagggacagtcacctggtggggtctaaaccatactgaaaagaatcccttcagtaaaattcctaaattacagactgcttaggtccatccagaatctcatcgagaccggacggctccctctggactatactggatatgtagacacagagcctacactccgtcacctgatcaatggggaagtagttgtgtcattggcaccattaagccatcccttttcctattgcccgtaaaaacaggtgagctcctaggtttccctgtctatgcctgagaaaagaggagcatatctataggaaattggaaagatgatgagtggccccccaaaaggatcatacagtactataggcctgccacacgagcacaagacggctcgtggggataccgaacccccatctacatgctcaaccagatcatacggttacaggccatattagaaataatcgctaatgaaactggcagagctttgactcttttagtccagcaggaaacccaaatgagaaatgccatctatcagaatagattggccttagactatttgctggcaactgaaggaggagtctgtggaaaattcaacttgaccaattgctgtctacaaatagatgatcaaggacaagtagttgaaaatatagagacatgacaaagccagcacatgtgcccatgcagatttggcataggtttgatcctggatctttgtttggaaaatggtttccagctctaggaggatttaaaactcttgtaataggcataataatagtgttaggacctgcatgttactcccctgtatgttacacatatttctccagttactaagaggcttcgttaccatcttagttcatcaaaacacctcagcacaagtatacatgaatcactattaatctgtctcacaggaagatctagatagtgaggatgagaatgagaactcccactagtgagtgaggttctcaaagggggaaatgaggagagaggctatttctcctactgtcctgtctccaaagaaaaggagaaagtaaaaactgaaaaataacagactgattggcgccactggccaggcctgtaggttaaagattaacccccaccccaaccgcttgtgctatccatagatcacagacaatggtatgaagaaatacttgccttcctcaccacccctacctagtcatgcagacaatggtatggagaaatacttgccttggtcaccaccccatctagtcgcgtaccccatgcttgctcaatctatcacaactttttcacgtggaccccttagagttgtaagcccttaaaagggccaggaaccctttcttcagggagctcggttcttgagatacaaatctgccaatgctcccagccgaataaagcctcttccttctttaacccggtgtctgaagggttttgtctgtggctcgtcctgctacagaaccaattcttctcaagtcagatccacacttttatgaacactgaagttctgaagtttcccaacaacaaaatgtttggaaaatgcactttgtacagtgtctgatacaacacgcaaaatcttatcatcttcaccatcatcagctaatgttattacttagaaaatctggccgagtattaataaaggtggggtgtttactgtgggaaagtgaaggctgtcttgaaatggcttttttctcaatagaagaaataaaaaagggtggctgagagtggtggctcatgcctgtaatcccagtactttgggaagccaaagagggtggaccccttgagctcaggggttcaagatcagcctggacaacatggcgaaaccccatctttacaaaaaaatacacaaattagcttggtgtggtggcttgtgcccatagtcccagctactcatggggctgaagtgggaggaatgcttgagcccaggaggggatcaagaggttgcagtaagccaagattgtgccactccactccaccctgggcaacacatttagactcagtctaaaaaaaaaaagaaaagaaaagaaagaaagaaaatacaaaagcgatgaaactggttattgttggtatccgcttctagagagccctggattcctgctgcagcctgtgggtcactgccccgccacacaaaggaccatgtatccattaggcaagatgggcacacacttaggggcacacaagattttttaaattagaagaaaaaaaatgaatgtttaaattgaagaaaatgcataatggtatatatttgtctttataccaaagcagttgcaaaatttaaccacaaaagtcataatgtagccccaagtcaccccccacccaccgtggaatttgtatgctctgtacaggagagcaagggctaactttactcccattcctgaccaatgatcttcctccagctcacatgggaccttgctgaatcatccccagtgcttttctctgaagtgggatctaaagttgttcacaaattctgcattcttttcttttctaaaaactctacttctgtgacagactacaaatcctgcactctttattcaataaatattaatttagtatttagtattacacatgcagacgctctgcaaaatactgggacaaaattggccaagacaggcttagtttttgtgcttatggagattaaagtcaaattgtagaaacatgtaatcaatgtgcttatcttactgggctgtaattacttagtaagtagaggaatatatatctatgtctaagattttctacatttacactgatcatagcatatataacctaccccctgaacttgacatttgcacacacacacacaaacacacagagttcagacaaatatgttgtctcttcttctgtaacttttcccccaaatgcctatcctaactacccccatgaagtcccctgataaaaacccttattcaaacaagtccagaagacagaattctcattgggacccccaagaacagaggaaagaatagatgaatggatggtgttaaattaatatgttaagaccctaccccccagatggatggtattaagacagtgggtctttaggaattaattaggtcatgagggtgaaactttcatgatgaggtagtgccctataagaagagacatgcaacagcttcctctccacaatgtaagaaaacctggaccctgctggcacactaatcttggacttctcagactccagaactgtgaaatgtttgtttaagccacccaatctataaggtacttttgttacagccgcccaaacaaactgagacaaatggatggatggatggatggatgaataatagactgaatagaggaataagaggtggacgggtggagggaagaaataacaaggatgaaagaagatgaacagagagatcgaggagtggatgcctagataaatacatacataaaagaataaaaagaagatagaaaatgaaagaaaaaaatgaataactagaaagatggataaattaatatacatatagaactttgacagtagggataaataaatgggtagaatcccagcactttgggaggccgagacgggcagatcacgaggtcaggagatcgagaccatcctggctaacatggtgaaaccccatctctactaaaaatgcaaaaaattagccaggcgtagtggcgggcgcctgtagccccagctacttgggaggctgaggcaggagaatggcgtgaacctgggaggcagagcttgcagtgagccgagactgcaccactgcactccagcctgggcgacagagccagactccatctcaaaaataaataaataaataagtaaaaaaatgggtagatggaaggagaaagcaagaactgatttggggaaaaagggaatgaagggatgtgtgaatatatatattatttaaaaaattatagagaattcagtaagcatgaacataagggtgaaatgagtaaatggatgaatagatggacaattagataaatgaacatagtgatgggctactaaatgggcagatggaagaatcaagtaatgcggtaagaagggatagatgtagggaaagtcgagctgatatttggaagggcagatatatagatgaataggagggtgatgcaagatagatacactgatgactgaatggataaatgaacacacaaataatgggtggccaaagtaacacggtagaaatagacggagtttcatttggtcaggtacagggaatggtagatttgtgggtacatgaatttatgagtggattgcatgaataactggatgagtggatagatcaatggatgatgaattggtgaatgaagattcaataaacaggtgggcatatgagcatatatgagaagatactgtatttaatgtgatatactagaatgtggaacacaaagtgttatgttatagcttggcctaatcctgctttcaactctttggggtctgactgcctcagaaaacatctgaggtaattagctctgtaaaaccttgaaagcagatgttcatttggactgcagtgacacaggaagattttatagggagggtggcatattcaccaaagtgaagaaaacatggggctgaagggagctgagggccccatcttttcctcctcaggatgaagaagtcctcacctcctatttctctgagacaatttgtctggcagagattatcactgacaaattgtttgttgttaattaaataacaaaacaggtggggtgggaagatattctgcaagttctcagatattccctttttggttgtggcacatatgtatgtattcatccagttagattcctgtttagaagggcctgctctgtgccaggtcctgggcatgtccccatgtggatgacaggaaagagtaagacaatcactgcactgcactgagtcccagagcctctacacctagcagccacatgaccctgggcatgctccctatctcatgtcattgtcatagcaaccccatgaagtaagtactacgaccatccagtttcaaagacgagaaacctcaggcacaatgggattggaacacataaaacactccctgtataacaggcgctgttttaagtgtccaaaaacattagatttttttgttacttgctgtaggttacaaaattcgtcccaatcccccactctctccctgactttgtgattttgtaatgtcactgcagcaattcccatcaagagatggcatctatctccttaattcttgaatcagatctgactttagccaacagaatgtgggagatgtgatgttgtgccaattccaaacctaagcctcaagggacactgagggtttttctgtctcttggaccctgatgttgccatgtgaaaaaattcaagctagctcctagaggatgaaaggttttatggatgagaactctggacaaccagtgacaaatagctaacttccagacctgggagtgaaagccttctagaccagtcagtccccagatgaccctcaactgactacaacatgtaagtgagcccatctgagatcagctaagctttgcccagataagcagaactgcccaactgctctccagactcgtgagctagactcatggctgttgttttaagccactgagtttggagtgatttgggagacatgacaggaacctataaaggccacataagtttgaaagagagataaacttaaaatgaccaagatacgaatatatgggagcacaaaaaaaggaaggaattctcctccacaagggaatcagtgaggttcctggagagggtgaagttgggatcaagccttgagaaaagtagagtcaagtttctgccaggagtgtctgcagggaaacctaagcgccaaaaacccacccaagagcctcagacaaataggtgagtcgggctttctcccagccaccagaatcaagacttgtgtaggcaacaagctggtcaggacaagcagcacaacatctctacttcggggccagactgctggacatcaagctacaatctaaaacacccagccaggggctacgccctccatctccctgcttctctcacccctgcactcaccaaatcccttatcctcccatactcccatcagcattcataacagctcctgtcaagagccatgcgctccagactcagggaaatgctcaaagccatgttcagtatcaaaatgagacagaagaaattatgtttaattcaacaaggaagcaactggctttggagatgagatgcggtgggcaagaagacgggggtagctgccagctgcagttaccacaaacaggtgctctgtgtgcagtatataccatacaccagccacggggctactgactctctgggaaggaacacacagccagctactgaatgggcagctgcagagggagctaggcatgatatctaaactggctttgatcaaaaagatatacatactcatagtttaagaatcaagtacacttacaagacttgctacaaaaatagcagccttctgcctctctctattcctcccaccctcaactcccagagacaaccacttgcaacgtttagctgattcatctgatattaccttgatatctctgaaatataaaaaaggaccaatatagtgtgcttttagttttaggtatcatctctgatcttccataattggaacattcttctttcacagctcccctgcccccaccataccttactttccttcctgccagctttccaacgtgagtcttcttgaaagaatctctccagaccattcgacttgctccagtctggaccaatcaccctcatatctggtgcacagctgttgccctggggtctcccttcattctctacctgagaatttccttcacaactctcttcagttagatatcctgcatttccattctctgtttttcacactcccctgatttaaaccctacttttggtggagcacatctcctaataatttgatatcaaagagtacatgagactttaatgtctaagaaagccattattcagtccttacatttgcttgatagcttggctggatgaagatttctaggctgaaaagtatcgtccttccaatcttccaaggcattaaaccaacactgtcttctagcttccagtattgctgctgaaatgtttcaagccattctgtttcctgatcctttgtatatgacacatctttttttccttcctggaagcttctagtatcttccctttgtccttcgtataataaaattttatcatacaacaaaaaagctataaaaagaaacattcagagaacaagaaagtattgaacattaaaaattgtagaacatgaataaaaattcctaccgaagtgttggatgacaaatatttaaaaatctacaataaaggtcaggcacagtggctcacacctgtaaatcccagcactttgggagactgaggcaggtggatcgcctgagatcaggagttcaagaccaacctgaccaacaaggtgaaaccccgtctctactaaaaatacaaaaattagttgggcatggtagtaggtgcctgtgatcccagctactcgggaggctgagaatagcttgaactagggaggcagaagttggagtgagccaagatcgcaccatcgcactccaggctgggcaacagagcaagactccatctcaaaaacaacaacaacaacaataacaaaacaataaaacagagaggaaaggcaatctgaggacacttctggttgtgctgacttctttcatgtaacaggctttcctcagctgtctggagatcctgagctgtctgtgtaatttaaggtcaggacactaacacactgattggaggctcaatcgcttgatgagatctatcaactatgggctttaccagagaggagtcatggggcattcccttaaagaacctccaatatcagtatctctggggaaacccaccaaaaagagagacctaaaaatttctctaaacccctgcctatagagtacaggcctggcagtcagcatcctggaagctgagtgtgagaagaaaaccaggggtcattcaatatagaaatgtttatataaccccattttcagtacagcatccctgctgtctttcatgcctagtgtttcatcctctctgagaaaatatactttctgctttttcaagcctcatctttacctccacttccagaagtacctggaagtgccaatttccgagcctttagtggttcttcagtgtaaatcaggttgcttctcagcagaccagagaaagctgactcctaagccagagtggggagaagcaatcagttcccacttgtccatgtgcttttcaactccccaaatttccacgtttttgtttcctctccctttttatgagtttacacatatctatattttaaatcttcttactttctgtttacgctcagaactgcactaatatgctagttgatgtatacattcaatgtttacgctcagaactgcactaatatgctagttgatgtacacattcaatcagccatctatacctagaacctaagctggctttcaaccaccaaagaaatccatacttcccttttagtttcctaagaccaaccaaatacccttcctatggaaccataaaagagagaaaagttcccacaatatctcactctgggccgtagtagatgataatagctattgtttgggactgcccagctccattccctttctgtggttgggcatataatccacaaataatcaatcatagcatctcattacccagggcagtgattggctcaggagtggacatatgattcaaccaagaccaatcaacatcctttcctgggacaaatatacagatgttgggaagagcaactgcaatataaaaagagtttctaagatgaaaagttgttaatttggggctgccaggggctatcttttcaacacatagaaaacgtctatctataatgaggaaaaaataaagccaagcagagatgtgtgagagagaaagtgcgtccaaaagagaggcaaagagaatgctgatggcatgcaaagagcaaaaacagaaagagaaggggatctggaataagatgaaaagaattttgtagcatggacatggagactggaaacagattttttagaatgggaaacaggggaagaagcacaaaactaacaacatgaaaatagatgaaagtataaaactcactgtaaaggtaaaaatgtagtcaaattcagaatactctaacactgcaatggtggtggatacataatttttaactctagtgtaaaaatttaaacacaaaagtattaaaataactatagctacaataatttgtcaatgggtatgtgacatataaaggtgtaaattgtgacattaatataaaatattgggggaagagaagttaaaagtacaaagcttttgtatgaaatgaaagttaaattgttatcagcttaaaacataatgtcttaactataatatgatttaggtaagccttgtggtaaacacacacacacacacacacacacacacacacacaaaaatctgacatagatacacaaaagataaagagaagggattgcccctacaaaaagtcatatcacataggaagacagcgagagagaaagaatggaacaaaggaagtacaaaatagtaaaaaaaaaaaaaaaaaaaaaaaaaaaaaatggcaatattaaaatcttacccatcaaaaattagtttatatgtaaatggattaagttctctgatataaaaatacagagtggctgaatgaattgaaaaacaagattcagataaattctgcttaaaagagacagtttagctttaaggactcaaagacctgacttaggctttcagtccatgcctgaaagggatagaaaaatatatttgatgaaaatgatagtcatgaagtccttgcccatgcctatggcctcaatggtattgcctaggttttcttctagggtttttatggtttttaggtctgacatttaagtctttaatccatcttgaattaatttttgtataaggtgtaaggaagggatccagtttcagctttctacatatggctagccagttttcccagcatcatttattaaatagggaatcctttccccattcttgtttttgtgaggtttgtcaaagatcagatggttgtagatgtgtggtgttatttctgagggctctgttctgttccattggtttatatctctgttttggtaccagtaccatgctgctttggttactatagtatagtttgaagtcaggtagcgtggtgcctccagctttgttctttttgcttaggactgtcttggcaatgagggctcttttttggttccatctgaactttaaagtagttttttccaattctgtgaagaaagtcattggtagcctgatggggatggcattgaatctataaattaccttgggcagtatggccattttcacgacactgattcttcctacccatgagcataaaatgttcttccatttgtttgtgtcctcctttatttcgttgagcagtggtttgcagttctccttgaagaggtccttcacatcccttgtaagttggattcctaggtattttattctctttgtagcaactgtgaatgggagttcactcatgatctggctctctgtttgtctgttattggtgtataggaatgcttgtgattcctgcacattgattttgtatcctgagactttgctgaagttgcttatcagcttaaggagatttggggctgagacaatggggttttctaaatatacaatcatgtcatctgcaaacagagacaatttgccttcctcacttcctaactgaataccctttatttctttctcttgcctgattgccctggccagaacttccaacactatgttgaacaggagtggtgcgagagggcatccttgtcttgtgccggttttcaaagggaatgcttccagtttttgcccattcagtatgatattggctatgggtctgtcataaatagctcttactattttgagatacgttccatcaatacctagtttattgagtttttagcatgaaggctgttgaattttgtcaaaggccttttctgtgtctactgagataatcatgtggtttttgtcattggttctgcttctgtgatggattacatttattgatttgcatatgttgaaccagccttgcatcccaatgataaagctgacttaatcgtgtggataagctttttgatgtgcttctagattcggtttgtcaatattttattgaggattttcacatggatgttcatcagggatattggtctaaaattctctttttttgttgtgtctctgccaggctttcgtatcaggatgatgctggcctcataaaatgagttagggaggattccctctttttctattgattggaatagtttcagaaggaatggtaccagctcctctctgtacctctggtaaaatttggctgtgaatctatctggtcctggacttttcttggttggtaggctattgagtattgcctcaatttcagagcctgttattggtctattcagagattcaacttcttcctggtttagtcttgggaaggtgtaggtgtccaggaatttattcatttcttctggattttctaatttatttgcatagaggtgtttatagtatcctctgatggtagtttgtatttctgtgggatcggtggtgatatcctctttaccattttttattgcatctatttgattcttctctcttttcttctttattagtctcactagcggtctatcaactttgctgatcttttcaaaaaaccagctcctggattcattgattcattcaaagatttaaagtgtcgactttaaatctttcctgctttctcttgtgggcatttagtgctataaatttccctctacgcactgctttaaatgtgtccctgagattctgctacgttgtgtctttgttctcattagtttcaaagaacatctttatttctgccttcatttagttatttagccagtaatcattcaggagcaggttgttcagtttccatgtagttgtgcggttttgagtgagtttcttaatcctgagttctaatttgattgcactgtggtatgagagacagtttgttgtgatttctgttcttttacatttgctgaggagtgctttacttccaactatgtggtcaattttggaataagtgtgatgtggtgctcagaagaacgtatactgtgttgattttgggtggagagatctgtagatgtctattagatccgcttggtgcaaggacttcatgactaaaacaccaaaagcaatggcaacaaaagccaaaatagacaaatgggacctaattaaactaaagagcttctgtacagcaaaagaaactaccatcagagtgaacaggaacatacagaatgggagaaaatttttgcaatctatccatctgacaaagggctaatatccagaatctacaaagaagttaaacaaatttacaagaaaaaaaaactgcatcaaaaagtgggcaaaggatatgaacagacacttctcaaaagaagacatttatgcagccaacagacacatgaaaaaatgctcatcatcactagtcatcagagaaatgcagatcaaacccacaatgagataccatctcacaccagttagaatggtgatcattaaaaagtcaggaaacaacagatgctggagaggaattggagaaataggaacgcttttacactgttggtgggagtataaactagttcaaccattgtggaagacagtgtgacgattcctcaaggatctagaactagaaataccatttgacccagccatcccattaccgggtatatacccaaaggattataaatcatgctaatataaagacacatgcacacatatgtttattgtggcactatgcacaatagcaaagactggaaaccaacccaaatgtccaccaatgatagactggattaagaaaatatggcacatatacaccatggaatactatgtagccataaaaaaggatgagttcatgtcctttgcagggacatagatgaatctggaaaccatcattctgagcaaactatcacaaggacagaaaaccaaacactgcatgttctcactcataggtgggaactgaacaatgagaacacttggacacagagcggggaacatcacacactagggcctgtcctagggtagaagagtaggggaggaatagcattaggagaaatacctaatgtaaataatgatttaatgtgtgcagcaaaccaacatggcacatgtatacctatgtaacaaacctgcacattgtgcacatgtaccctagaacttaaagtataattaaaaaaaaaaagaaaatgataaacaaaaaagagccagggtggctatttttatatcagacaaaatagactttaagtaaaagaaaatgtcacaagagacagagaaggtcattatataatgataaagtggttaattcatcaagaggatatatgaattgcaaatatatatgcatattgggtgcacattggagcacctattaaataaaccaaatattaatggttatagagggagaaatagacaacaatacagtaatagtagaggattcccattttctttctttcttcctttttttttttttttttgagagagtcttgctctctcaaggtgggagtgcagtggtatcatttcagcttactgcaacctctgtgttccaggttcaaaggattctcatgcttcagcctcccaaggagctgggattacaggcatgcaccacaaggcccagctaatttttgtatttttagtagagacagggtttctctatgttggccaggctggtctcgaactcctggcctcaagtaatccatctgcctcggcctcccaaagtgctgggattacaggcgtgagccactgcaccaagccagtactcccactttcaacaatttatagataatccagacagaaaataaataagggaacagtggacttggggggctaatgggcctaacagacatatacagaacactccacccaacagcagaaaaatagaaattctttttaagtgcacatgaaaaaacatccaggacaaatcatatgttaggctacaaaacaagttttaacatattagaaaagactgaaatcatatcgattttcttttccaacaaaatggtataaaactggaactcaagaacagggggacagttggaaaattcacaaatatgtaggaattaaacaacacacatctaaacaatcaacaggtcaaagaagatgtcaaaagggaaaacaaaaaaaatcttgagatgaatgaaaatgaaaaaatagcatatcaaaactatatggcatgcagctaaaacagttctaagaggacaatttatagtgaccaacacctacataaagagaaaacatctcaaataagcaacctaactttacactttaaggaattagaaaaaaaagagcaaactaaggcccaggtcagcagaaagaaggaattaaaaatcaaaacagaaacaaataaatgaaaataaagactaggaaaataatagaaaacattaaggaaattaagacgtgtgtgtgtgtgtttttaagagataagcagaattgagaaaccattagatagactaagtaaaaaaagaaaactttcagataaaaaaatccttaaaattaataaaattataaatgaaagaggaaacattacaactgatatgacagaaatataaaagatttctagagatactatgaacaattatatgtcaacaaattggatagcctagagaaacagataaattcctaaaaacatacaacctaccaagactgaatcatgaaaaaacagaaaatccaaacagaccaataatgagtaaggaaattaatcagtaatcaaaaatctcccaataaagacaagcccagtaactgacggttttactggtgcactctaccaaacatttaaggaagaattaacaccagtccttatcaaatttttatctgaaaaactgaataggaggaagcacttccaaattcactttattaggccagcattaccctgatattaaagccagacattataagaagactactaatcaatatccctaatgaacataggtgtaaaaatcttccacaaaataccagcaaactgaatttaccagtacattaaaaggatcatacattatgattgagcaggatttattctttgaatgaaaggatgattcaacattcaacatacacaaatcaataaatgggaacccacattagcagaatagaggatataaaacatatgattatcggccgggcgcggtggctcacgcctgtaatcccagcactttgggaggccgaggcgggcggatcacgaggtcaggagatcgagaccatcccggctaaaatggtgaaaccccgtctctactaaaaatacaaaaaattagccgggcgtagtggcgggcgcctgtagtcccagctacttgggaggctgaggcaggagaatggcgtgaacccgggaggcggagcttgcagtgagccgagatcccgccactgcactccagcctgggcgacagagcgagactccgtctgaaaaaaaaaaaaaaaaaaaaaaaaaaaaaaaaacatatgattatcacaacagatgctagaaaaaaaactgacaaaattcaacatcatttcatgataaaaactctcaacaagtaacaaccatatacgacaaacccacagctaacatgacactcaactgtgaaaagtggaaagcttttcatctaagatcaggaacaagacagggtgcccatttgtatcacttccattcaatctaatactggaaatactactaagagcaattaggtaagaaaaagaaataaatggcatccaaagaggagagaagaaagaaattgtttatgtttgctgatgatatgatcttgtatatagaaaaccctaaacatgccaccaaaaaactgttaaaactaacaaattcagtgaagttgcaagatacaaaatctacatacaaaaatcagtagcaactatatatactaacaagaaagtacctaaaaacagaaataaacaattcaatttacaatagcatcaaaaataaaataataaatttaaccaaggaggtgaaaacactgacaaaaaattgaagatgatataagtaaatgaaaaaatatatttatgaattggaagaatcaatattgttaaaatggccacataatcaaaagtaatctacagtttgaatgcaattcctatcaaaattccaatgtcattcttcacagaaaaagtaaaaataatcttacaattggtatgaagccacaaaataacaccaaatagccaaagcaatcatgagtgagaagaaaaaagctggaagcttccatattgtttagaagttagaaatgaaacaaaacaaaaaacaaagttgaaggcatcacactacctgatctcaaaaatatattagaaagctacggtaattaaaacaacatggtactggcagaaaaacagaaacatagaacaatggaacagaatagacagtccagaaatatatccatatgtttacagccaatcttcaacaaaggtattaagaatacacaatggggaaaacatagtctcttcttcaataaatggtattggtaaaactgtatatcaatatggaaaagaataaaattggattataccatatacaataataaactcaaaataaattactcaaatataagacctggaaatgcaaaatgactagaacataggagaaaagcttcttgacattggtgtgggtaatgatattttggatatgacaccaaaagcacaggcagcagaaacaaaaatagacaaataggattatatcaagctaaaaagcttcttcacagcaaaggaaacagttaacagaagagacaacctacagaataggagaaaatatttgcaagccgaatatttgataaagggttaatttccaaaatatatgaagaactcaactcaatagcaaaaaacaaacaaaaaacaaccaaataactttattaaaaaacaggcaaagggaccagctgcagtggctcacatctgtaatcccagcactttaggagggcaaaacagcaggatctgttgagcccaggagtctgacaccagactgagcaaaatgatgagaaactgtcttttcaaaaaaagaaagaaaaaaatattagctgggtgtggtggagcacgactgtggtcccagcttctcaggaagctgaggtggaaggatcacttgagcctgggaggtcaagactgcagtgagccaggattgtgccactgcagtgcagcctggttgacagaacaagaccctgtctcacatatgtaaacacatggatatatgtctcaacataaaacaaacaaaaatcggcaaaggacccaatagacataaaaatggccaacaggtatatgaaaaaatgttcaacatcactagtcatcgggaaaatgaaaattaaaaccacagtgagacactacctcacacttgttagaatcgctattatcaaaaagacaaaaaattagtattggcgagaatgccgagaaaaaggaatccctgtactttgttggcagaaatgtaaattaatacagccactttgtaaaacagtagtgacattcctaaaaaaaataagaatagaactaccataggatccagttgtctcacttccaagtattgtgaaagttgattataaaaattgggtcattctactgaatgaaaacagagttgagaagccagagggggaaaacactcagggtacataacaccgctccaagaatataattatttgcaagcctggctgtgaaattgcctgtagtaacctgaagccagttttatctaatagctactgacacaacctgctgcaaatctaggactagttttaccatcaccaccactcaccaatcagagctttcttgctccccagaactttacaagtgccacgaactttcttgaaaaacaaatacataacatttctccttgttataaaacttccgaccttctctttgttctttggatacaccaaagaccacccagtctgtgtatatcttcccaattgcaatttttcctaaacaaaacatgttcatgtcagagattcatctctatagtttatttgacttcaacagtatatatcaaaaggaaatgaaattggtatgtcaataaaacatgtgcactctcatgttctttgcagcagtattcacaataatcatgatatggcatcaatctaagtgtccatcagtggatgagtggatagagcacatgtgagattgagatatatatatatatatacacacacacacacacacacacatatatatatacacacacatatatatacacacacacacatacatttatgtataatggaatactattcagcttttaaaaaaggataattctgtcacttgtgagaacatggatgaacctagaggaagttacgttaagtgagataagccaggcacagaaagacaactaccatgcgatttcactcaaatgaggaatcaaaaaagttgttgaggttttagttcaaaatggctgactagaagcagcaagcccatgcctctctcacagacaggaaccacaatggcaagtaaatcctcacacttcacatagatcatcttaagagagcatgctcggattcaccagagaaccaatgggacccaaggaaagcagggaacagtggagccaggcagcctgcggagctgggacggtgtggagtgaagagaggctcttactccaaggaaggggtgaatgaggtgagaggctccgggacccacctctccatcacagacttttacaatcctagccacaggagagcccccataatcctccttaggcctccagctgaacacagagccacccagaaactttgcagaggcaccgctcaagcccacctggaatcccacagtcagcctggtgccagctgccatgccaaggagggaggcgaggctctttgcacacccccaggagagacagcacagctgctgtgcagaggagctgccagaccacacaccacactactcccggcctcggctgcttcctgcgaaatggggcttacctgttgcaggccccctgtacagttgacccacccctgcagaaacactggccttggctaggtgtttctctgagaccccgactcccaggccagggagagagtgaggaggcctgggacctctgcatgaccccaagaacaaaatccagaactgcttctgcaggagcaaagtgtgagtaggtcatgtgccccccaggtgccaatctccagtgccctgaggggccctcccttcccccagtgaaaggccacctggctcctgcctgagcatttccgctgcaaccacagctcttctgagagcccagtccccacaggcctgtgctgccctcaggctcccaccacctgggccttctgtctgtcccctgcctgagggttctatcagcctctcagggaccagccagccccttccccatcacagccagctcctgaagtctagggtgccccaaccccagtccagccccttaacccatttatgcctgaggttgcaattttttaaatttttccaatcagaccttggcgatgatcttgagcagtgggatataaataagtcccacatgcttagtattccagtaatggaacactaggcataaatgggttttaaggacccatactctctgtccggtaggccgtctaagggcctgagaactggggcgctatgtagaccaatccaacagtgctggcacctaaccacttttcccagggcctgaggtcaggccagcccaaccagttgacaccaccacaactgatacccatccacaggggctgaaaggcagagtgtatcccctggccctgacaatgcaacatcattaccacatcaaaggaaagagagccatacgctgaaaaggttctgccccaaaaccactcctgtggagagtctcaagacaggtgtgttccacagctctcaacccactgtggcttggatgtagacaacagtgaggatctgaactgagagtcacgagttccaggactggtgtgattgggaatagatcactttcctgcctatctagcgcatggagctagtgcagccccttcacccgatgtagagacctcagcacatgtcactgggagctcccaaagccatctccacaaggcttggtgcctatacttggcattggagtatttgtgggcaagccagggggtccagctctgcccagctctacccactccctgctgaacagaaaactcagggcaccaggcacttcactgtccagcccatcaccagaagcaacagagagcacctcccagtaaacaaagaccaagtacctacccatctgctgtgccacaagctggctcttacccgtcagcgccatctactggcctgcaggttgaactgcacagccaaatataaagcctggccaatggaagtgcgtgggctatagaagcaaagctttagcaacacaacgtactccacagtcactccctagggaaagggagggatggagaaagaaaaaacaaataagaaaaaaaaaatcccatctgaacaaaaataaattcaaaaataagagtggttttctgtgagcagctgctccagatgagaaagaatcagcataagaattctggcatcatgaaaaaatctgaatgttgtgacatgactaaaggatcatattagctctctagaaatataccctaaccaaaatggaaactgagaactgacaaagagttcaaagtataaattgcaaggaaattaaatgagattgaagacaaggttgaaaaccaacacaagaaactataaaaacaatccaggaaatgatgggaaagataaatatattttaaaaaatgcaaaaggacttcttgaaataaaaagcctacttaagacatttgaaaatatagttgaaagctttaacaatggattacaccagcagaagaaagaatttcagagcttgaagactgatcattgaaactaatttgtcaaaagtaaaaataattttgaaaaccaaagccagagaaaccatatttctctggtgagaaatatgaattatctaaagcaataaaacctatgacttattagcattcctgaaagagaaaaagtaagccactggaaaacatatttgaaaataactcaagaaaattttcttaattttgctggagagttgaacatccagatacaaaaaattcagagaacatctgtgggattctatacaagatgaacatcaccaaggcatatggtcttcagactatgctaagtgaatgctgaagaaataaaaaatattaaaggcagctacagcaaaaactcaaatcacctagaaaggaaaattgatcaaacactggacttctcagcagaaaccctagaagcaagaatagattggaggcctatttttagcctctttaaataaatgcaaaccaagaattttacattctgccatactaagcttcataaatgaagaagaaataaagtcttccccagacaagcaaacactaagagaatttgtcaccactagacagatcctacaatacatgctcaaaggcgttctaaatatggaaatgaaagtactatactcaccatcagaaaaagataccaaagtacaaagctcacagatcctataaagcaattacacaattgaaactccaaaacaactagttaataacacaatgacaggagcaaaacctcacatatcaacattaactttcaatgtaaatgacctaaattgtacacttaaaagatacagagtggcaaattgggttataaaaaaaataagatgcaaccatctgctgtctaaaaaagacccacctactggctaaagacacattcagactcaaagtaaaagggtagaaaatgagatcatgcaaatatcatgcaaacagacactagaaactcttaaaaggaaggagggtggaaggggagtgaggactaaaatattacctgttggatacggtgttcaatatttgggtgatggaaacactagaagcccaatttctatcattatgcaggcaatacccttgtaacaaacaagcacatataccaccagtgtcaaaaattaaaatttttttaaatgaaataaaatttcaaactcacaaaagcaaagaatggtgtttgccaggtactggggatgggggagcaaaatgagatgttgctcaaagtaaacaaagtttggtagacagcatgagtaagttctgcagatctattgcaccgaatgtacaataataatgtatacttggaaactgctaagagaatagatcttaaatgttctcactgcaaaaaatgtgctagcttgatttaatattttcacaatgtatactgtatcaaaacatcacattgtacactgtaaagatatataattttatttgtcaattataccttaataaaattggcagggagggatgggtgcaagaaataaaggatatgagcaagaaatgaaaggcatctgtgctgggctcgacttttccaatgtattcacttgacacatcggtgacagtctcatgttctgacttttctgacactgtagtctggaaaaaactatcccctatatgcaacacagccattaaaacacacacacagacacacatacacacacacacacacgcagaggaacttaatacagtaatattcaatatcaccaactttgcctgttaccatggtaaccagcagcattaagtcctgctgctaaaatttcaagagcagatgacatgaactatttatgtataattgcattttataaagagaaagaacttgtctttcatataaaatatgactcagtctcagatgagatgggtgattatatcacattgccgtcagaacaaatgtagcaagtcccttgtctccacgccctctaccccagtgcatgttacttccatatgcaagtggaaagcaagatggcaaacaagggttagcctcccacagaaagtgcctgccctgatttgagctggcgtcactgcaaagacgctcagggttcaagtattcacttctccaaattgagttaaggggttctttttcatttctactcttacaagcttgtgcacctgctgtctgtcccctgtggttggcttgtcttgagccacagccacttgtataagtcatcagcatggagtggacatagaccaggtcaaaagccttcatcttgtagatagagattgagaggggtcataactagatgtttctggagacagggttgtgctcagtagtggcatccattcgccagcaatagcacaggcctaaactagttcagcattggatcatgttgatttttccctcatccggggattttctgcagacattctaatgtcaatttcgcagaccatcatccttcctgagccaagctatcaaggaacaaaaagagtaggtgttacctatgtggtgacagctcccacccttgagcactgagccttgttcctgagcattgcagcactgttcacagccaagtgaaccgtcttcaagaagccttcgtcactcatgtgttcaggaccaggaaaaaagcttattcaataactaagtaaggttatgtgattatctctttaatcatatctttaataagttttctgggaatggtagaggttttaaatgagaacgtattcaaccaaataacgttgagctccttaagggaagaaacaaattccatgttttattcaaggtgtgattccaattctgggtacagagacccccacaaaaacggctctgctctaatgtttgtgggatgggtgggaagatggacaacgcatggatgaaaattcccaaacaggaaaatatatcttgaatgaaagaatgaacgaaaatactggttttagaaaggagggacggatggagagattatcagggcagggaagatcccgaaggaaatgagcaggctttgctgaaagagtttcttgggcatgggaaagacccagatggggttggcctgccatttacccctctgcaggaaattcctccaggccacaccccaccttctctgattttctcagctgccgaaccttgattgagctgtgttccctgttacaatgccagaattgaaaaagagaaaacaaatgagaaaataaatcacgataatttcccctgccttaacaagacacttgcattcacgtactgtgtgcctaagaagggcagttaccagtgcagttctgtagtgaaaaggtttcttgagccagagaaagacccagaaatggatccttggtggccatctggacaaagcccttaatcagtcacctatgatgcccacttgctagtcctgcatccaggttcatgggaagtctgcagccatgacaggctctgcctggggttggccctccaccaaagagcctccggtccctgcctcttggggcacagacccctactgcccccagcctactgacctgccccaggcccctgcagtctttatcatcaccgcatcgtgcagtttgggtggcatctggttctaaaatgttcccaggcttctgccttgcttctcaggtgcaccagtcttttcacacatgggtgggcttctctgaagctgctgcagttactcccagtggccaaatcatttcttacttcccttaataaacaaggcaacagggttttgatgaaagagtttcttctttggagggcagaacagcttccttgccttgattaaaatgtttgccagctgtttctcattctggtctcaaggtggcttaaatcttcaggaaagtcagacacttcactcactggtaattatttttccttattaaaaatctatttgcctccatgtgaccaacatgctactctccatcatgatgttgagccattcccacctcttccatccatctccactccaatttggttttatcatctgatcccaccaggtaagagaaagcaattagccctctgcccttgaagtttgaccccgacaagattaatccggttcctcggagtgtctgaggacctggtgaaaacaagcagggccttttgtcaggtctctcctcacacctgtgaaggtctctgttcatgactatggggcatgacagcattcacagcacaaaacacttcatcaacattctaagtatacccttgcagctcaaaattgtcagcacttgaaggttttcctcttcagagatggtcttatcacaacagcactgtgtggtcattctcctgagtgctgctgccctgcagataggtccaaagcccaacttgcagagtcacttcttcacgttgcggcccaagatgcacaggacttctgaggtgctgaggttgaggaaagaccggatacaagaacacctcaagaattttgtacccagagggcagagcccagacataaatgttttaaaagaaagacgattttccatgatcttggaaatttctaggtcagactgctttcacacctattttggaaaaggggcctactccatccctgcatcaaccatagcaaagaaagtcaacaaagaccaaaaatatatctgaatgaatgggttttcattcattctttcaacaatttattggttgattactctgcatcaggcaaggttctagatgaaggcactagagcctctatttaatctgaatttatcttttcaatacatgagccaaattctgctgactgggaagcactaatgagacaattaaacagaagtctaatctagagtgactggggcggtgctggttcactttgtttaatcagggcaggctctttaaggaagcccttgaaggcatacatgggagagcctgctctcccttgctgggcctggccacctctaccccatcctcctctaaaaacagcgttttcaagatcaaagaggctaaactgacaccactgtcaaaatctaattaaaacctctcttcttctagtaaagatgttaacactggataaagcagatcttcatccccaacaaaaaaagaacttgttttaattaaacatccaattttaagttggttttattgctattgttgtgtttttgtttccatttgtgccagacagaggacaggaagactgtaatctcttacaaaacatacgaacatatgtcctagatggcaagatccctaggcatcttcctctgaagtcctcagtcgcactctcactcacagacatctgctggggtggagggactgtcaaaaactttttcaggtaatctggtgagatgtattcaaagacttaaaagtgtatctttttttttttttgcacttgtctttaattatttccttaatctctggaaatggaatttatctgcagtgaggttcattatagtgccatttgcaaagctgaaaggctggcaacaacctaactgtccagccacaggggataatgacgcattcatctactggggcatggggcacgagcccatgagaaggtgacatgatttacaagaaatctagaatgtgctgttgagtgaaatggtatggaccagtatgatcgcattgtcattgatttttacctgtacattcataagctcgaagaaatccagacagttaaatctcaaaatattcagaggagtgacattgtggaagatttttattttctcagcaacattttcttattttacaaacatcacatatatgacttgagtaattttttaaagttaatgtttaaaagagaacaaaatagttgcccagagtaaccctgtcttttaagtatacctcctaccccaaagtgggcagtaactggcttgtctggcacccatgggtgatcttgtctaagcttgctgccctgttcttagggtcgggggctacctgggtattaacttgagtctgtggattgctgtgaagtcattgagaaggaacacaggccctcccagagtgcaggcacacttgaccatgcagtgcccaccctgccaggactcatgggagaaccagccattctgctcagctcccggttagtcagtcccttccccgctcaatgtttccaagcacccaccctcagtgcatttactgagagtcccctgaccatcagacaaggactgtccacaggccgtgagggagggaggggcatcaccgaggctgctgggcctgctttcacattgcctgtccgtggcatggaggttcctccctccctgatccaccccttgttcccctgcccatgtgaacgctgggattgggcctgagaaagaaggaaaattgcttcggcttccaagactagcctttctcatgtttgtcttgagtgtatttctgagcagaaaaacaagcttcacaaacctcatgactcaccttcatgttttctgtatgcttccctctcccctgccttgtctcactgatcccttgaggctctccctccccagcccacatttactccatagcttccagtagagtttttcaggttccctgcaaagtgcaaatatacacacaattctgtgagtcaggcagtatcttaaagaggttccatcacacccgaaggtttggagtcactagcctgtttgtgacatgtcttcaaggatgaacgaaagatttgaactcttcagccttaaaataataaataaaacctgaaaatgaaaaacctcaccaaattaagcttctgcccattttagaaaacaagggcaaccacggaggagatgactcagttcttaaagacaaggttacccaaatgggtgcattgtgggatccaagaaggatgcttctgagcttgttgagctcagcatcagcacagacatctagctagtccgagaactcagatagggaccaggctctgtcctggtgggttaaatcttaaatctctatgtagcccattactatcagcaaatggatctttatttaagctctgatcttgtattgtgtgtatatccttctccccagctctgagctctctgagaggacagcctacagtttttccatttctatctccagggcctactcccaaaagatgaaccttcaactgtctacattgcacgtctgggccttcagcatcgctgatgcgccagctggcaccagcttcagcagcccagcgcatctgctgtgcttgcatctgccatgtcatcgtggggtcctgggcccctgaatgcagcaggccagcttatgtggtcccatcctctgcatctctgtctgcctctgcagtgcagacggctctgaagtcacaccagcctaacttccaggcccagacctcagggggagccagattgccatatcattcctgtatccagatccagatttttcctgctgcctctgttcttcctaggccgcccctgttattcaggccatctcgtcccactgccaacatgagcaccaagaactacatcattccattgctttcagcattccctccatcaatggtggcaccgtacacagctgtgtctgtgtaaaacaagagttcccctgcctgaagtatgtggggggccctttgctgaaatattttagctcagattcttttagaagaagtttcactcttttccatgaggacttttctttcatcctcaggcatcaaatgcccgttagaaagttctcagttttgcctgcatgtcaatgtttctaaacagtctcatttttattcctgttgttgtgaaataaatgccttaatgtcccccttgcccatactgactgttacaatctgcctggccatgcctcgaccttcccagataccatgcacctgtcccccttgcccatactgactgttgcaatctgcctggccatgcctcaaccttcccagataccatgcacctgtcctacgccataattaaaatttactgcaatcttagctttgtcatctggaccgtgccatataaaaagaaaggcacaacctcagaatgtttttccttctaaattgctgtaaaattatgagttatgtcaactacaataaaacttcaattattcagatgcactaggggaacatgaccaaattttgaatgagtgaagcagctttacaaaaaagcagaaggtgcgtaaggaaagaagcgagatttcagagcttctcatttctgctacaggacaatcagcctcgcgctgcagcagaggacacaaggaacccacctcggagtaaatcagagagcacaccacaaatcagctcccctgatagggtaaggtggaaatacactactggagggaggcctctctcctgtgcccatgtgagatgttggctataaaccccatcctggccagagcagtgattttccactaggcaaatttaaatgtgtgttattgtctagtatgtgagataacaaaattgaagataaactttcactcaccaaaaacttgccatatctcaagtagagtgtcctccctctttcttgcccacatctcaccttcattctagtcatgggtgcttataaaccctattctgttagagacagaaagggttaacaagcaccatgagccaacacaagttcaagatatcatatacttttgattgtctgttttgaaaacgtttatgccgagggaaatgttaaagcaggtgtccgaattagaacaagtgtccatgtaatacaagaagatggattttggctaccaagagccacaagagcagagacggaaccaaaggcaagatgacgtgtcatgagttacaaggaagcagaaggcaagccacccacatctcctttagttctttaggcatttaatcagctagaaaagctggtgcctgctgctccactcccagtggcctatccattatcactaaaataataatgacaaattgagaaaggcacagaggacaggcaaatgtgaagccaagtgttgaagacggcaacaggaggtgacagccagcagccctcaaacaccagaaggagccagtgtcggccttgggggcctcctcctctggagagcaaagccagctgtctacattcatagcccaccagaaagggcagatgagacaaggagggctgcaggacagtgacaaagaattcaaccccggagctgcatcagccctaaagcagccttgcctcatttctgcctgagtaagagcaagccctggaatcacagtgaagggattacattagacaggacctacgttagacaggagcaggggctctgacacctgggcttagctgggagctaagggggagctgccctctgcaggctggctcaccagactcacctgcagagttggccactcaaatggctatctagagcccagcctccgcagctgtccagcagtcccctgcttttgggttgcagactctagcacccaaattccagaatcctctcttgtctcatgagctcataggttaaggtacagcctggtttattatcctgcacaaaatcctaatgacttaaattaaacaacaacaacaacaacaaaaaacagaaaggcccaccaagcacccagaactccctggagctccagcttcttatgtcctaaatatcaaaacatcatcttgtgacttcattattctctgtgtttccattctttctataattcccttcccaacaaccttcacccaggtaactcctgctactcctgctcttctgcagagaccaccttgcataccacccctcctctcccgttacattagaggcccagttgagcattttattttacctttgggacatttattcctttattcactcagcaaatatttattgtgcatctactagtcataggcacagagctagacaatggggattctgccatgaccaagaaagaaacaaacagtccatgtcttcttggagcttgccatctaaaggggaagacatcattaacaagacaaaacaaacatcgtatgatagcatatgatgctagatagcatattaaatgctagatagaaattaaatgctagatagcatattaaatgctagatagaaacagcacactgagctatgagaaaacagcacatgctggacctgaggtgaggccactacaactgaagcactactgtaaacttacacagttttccttcccagtcccaccacctcctgacaggaagcactctccacaaggcagggccccatgaccagcagctcacaccacagcacagggcaccaggcacgatgaagggtcggcgagggcaggggctcttcacccagaagactctgaactctggctttccttcaccttcctctgcacccagttgcacaatttgttcctcataattaatccatttgacaagtgagaaaactattttcaaagtaaacaaaataaatcaaaatggtgctaacttctctccctaatgtcctccatcaatcatggatgactcgagctttttaaacagagaaactggggcagtggagggagtgaaaaaagttttaaactcaactgtgctcccaactctataacattaagatgctggaattgatttgttgttaaaaggagagttgcaagtactatctatgcctagaaggaggagggaaaaaaatcaatagtaaaccatgtaattgggagaggggtgaagtagaaaagggtatattccctactgactcagagaaaaacgcaacaaagagtcaaaacaccctgatttaatgcctaacttaaggctgcacaaggcagagcgacagtgccaggaagatgtagaagaaggaagtgttaacttgaaatgactctcaccagcctctaagggcaggagctgaactgtttgctgaaaaccaaaaattcacaaaggaatagtgggaaaagaggaaacaaggatagcataggtcctccagagaaagacagaagacagagcagccagccttccaaatcggaagtcacatgctcacctccacagtgcctgtaaacaactttttttttttaagtttttatttatttaattttgagacagggtcttgctctgtcacccaggctggagtgcagtggtgtaatcatagctcactgcagcctggaactcctgggctcaagcaatcctcctgcttcagcctcctgagtagctgggactataggcacataccaccatactaggctaatgttttaattttttgtagagggcgggctctctctatgttgctcagggtggtctcaaactcacggcctaaagtgattaccccaactcggcctcccaaagcattgatattactggcatgagctaccacacctggctctttaatttttgtacagtgtattgctatgttgcccagactcaacttaaactcctggcctcaaggtatgctcccacctcagtctgtcaagcgctgggatgacattcatgagccaccacaccaaactgcttaaggttttgccattcaaattaaaaataaaggcaggcacactaggatggctacagtaagaaatatggacaattgccaggtgttggcaaagatgggaagaaatcagtgggaatgtaaactggtgcaatctctttgggaaacattctggcagttcttccaaaagctaaacagagaattcccatatgatcccagcaattccacgcctgggtataaacccaagagaactgagaacatatggccagagaaaaacttgtacatatatattcatagcagcattattcataatagccaaaaagtggaaataaaccaaatatccatcaacaggtgaatggataaaccaaatgtggtacatgcacacaatggaatattcacatataaagaggaataatgcactgatacatgctacaatatgaaggaaccttaaaaaatgctgagacagtagctggacataaaagacaacatattgtatgattccatttatatgaaatgtctagaagaggcaaatccatggatacaggagttggcttagtaactgtcagggctgcaggaaggagagtggaatgagaatgactgctagaagtacaggtttcttttggggtgatcgacatgttctgggattaaacagtgctgatgactgcactcctttgtgaatatactaaaaaccactggattgaacactttaaaagaattttatgatatatgaactacattttaataaaaagaaaataagggcagaacatatatggtaggaggtggttaacctacttgacaaatttatctcatcatcataaacaatacagtaatcattaataagatatatatttaataaatcatgcccaatttagcaacaccttgaagtagatggtttgaggttaagtattatggccctgaaaatggtaaaaatattacttttgaaacattttgtagtatcaaacttttaataaattctatctggcttccaatagctatgtacattaggcaggtattatgggctgaactgtctcccccacaaaattcttatgttgaagttataactcccagtaccttagaatgtgactgtgtttggagatagggcctttaataaagaggtaactacgtaaaatgaggtcctgtggttgggccctaatctgatacgagtggtgcccttctaagaagagattaggatgcaaacaggaacaggggaaagactacgtaaaggacagggaaaagacgacatctacaagccagtaagagaggccttgggagaaaccaccctgtcaacaccttgatctcagactgccagcctccacgactgtgagaaaataaacctctgtggtttaagccacccagtctatggtactttgtcatgacaactctaggaaactaatacagaaggcgttcatgtgttaaattcagatttaactctatatttattatatgctgaagcatatgatagtgaactaatagagtgaactaaccattacaagagctattccattttctaaaagccatcattaagcatttaactataagggtccaccgccaaagtaaaacatattttttgtttttttttagagacagggtttcactctgtcaccctgcctggagtgcagtggtgcaatcacggcccactgcagccttgaactcctgggttcaagtgaccctcctgtctcagcctccccagtagctgggactacaggtgcataccaccatgcccttctaattatttttactttttttctgtggagacacggtcttgctatgttgcccaggctggtcttaaacttgtgacttcaagtgatcctcctgccttctcctcacaaagtgctggtattacagacatgagccactatacctggcctaaaattctttttagaaaattaaaatacttttgtgtgtgtgtgtgtatatatacatgcatactttaaaagaattttattatatatgaattacatatacgtgtgtatatatacacacacacacatacatacacacacacacacacacacacacagtagaatattactcagccacaaaaagaaataaagcactaatagatactttcctggggtatcaacgtgggttgctacaacctggaagaacctcaaaaacattatgctaagtgaaagaagccagtgacaaaagggtacatactgcattattccgtttagatgctctatcaagaacaggcaaatccagagacagaaagcagattagtggttaccaggaggtggagaaggcagaaataacgagtggttacttaatgggtacagggtgtttttctggaattaataaaaaagttttgaaactagagacaattgatgcttgcacaacatttagtgaatatcctaaacgacactgaattgtacactttgaaatggtaattgtatgttatatgaatttcacctcatctaaaaaatcatactcctaccagtatagcaggatacctcttcccacacaggttctaagaaaataatcagctaagtgtacagtcatgcatgggtaaaagtgtttgttttagcatgtgtattgttaaaatgttttataatagtgaaaatttgcctaatgttcatcaaagagtagataaataaatcagagttcatctatatattggaatactaaacaaccgataaaaacaattaggtagatccacacaaaaaagtcccttcacttagaagcatattaaattcctaagtgctattaaaaatgtaactgttggccagtgaaaatgatattacacacctgaggacttgccacctgtcagtagaaggcaaagctgaactgtgttctgtcccagctttatttacatggctttgttcacgtggctgcagttcccagagcagtgcctggcacacagtaggtgctcaataagtcttagatggatgaatatctaggaagaaccattaaattttaagttttaagaggaagttctgtagttcatatatcacagacattgcactttgtcaataagtagaaagaagattacaaacaatgtatctggaaagctgccattctgagaaatatagacatatacatatgtaatatgtgccaagaaataagtccggagacatacacattaaaaagttaacagtgattatctttacatggtgatattataaatgatttaaaaattttcctttgcatgttgtctgaatttttcttttaacaataagcatagactacttttctaatcaggaaaaaattgaaaaagcaataaagctatttccatgtagaaaataaattccttttattatctataattcaattctgaagactattaattgggcatgctagatgctttcactgatctgctttggttgttctgagttctaaatccatttagttctctaaaataaacaacttactcaaagaaatccaaacctgctcagaaaataccaacattagtaatgtccagccacaccacaagcactggtgggccactgttggtccaattattaagaatctgtctgttttgggtgcaataagcaataggctcactcagtacctatgaggcaccaatagtacctgctactgactaactggccaaagcccccagagtgtcatgagaggggagaaaccatccagtcagtcaataatcacaggttaatgaaagaacactccaccagcttgctatccccgaagaccagaaagctgctatgctcttcagaactcttaacaaaaacgacaatgacaaaaattgttttccttgactctcaccttgagaacaaaagactaaacccaagtacaatgacacaatagagtttcttgtatactgttttcatttctcagtgtcacttctgttttctgtgactcttactttgggagtaaataagtcatttcctccaggatcctgaactggtcatacataaaatcttcccggcaggacaagcctcaggtgggcagggagtctgtgaagtagggagtctcaatcccatctccttcagaggccagtgtggctcaaacttggggacctcactcatcgaagggatatgaggcgaggggtgcgggtgggtagcctgcgccagacctaagggtcccactgcctgtcagctcctgacatgcctgactcagggtccaggagccacatcctccaggctttaagcagacaatggaaattctgatttttatgtaaacgcctgtttttgttctcttagccactaattagattttttaaacactatgcagtccaaaccaagaacatctatgggccaccagtatgcgacacctgagcatttgaccttgagtttgatactgactccaggcctttctactcctggcaagtcacctaaacagaggacaggtcattatctgaggacttttggacttgaattcccttttcatctttatttcatgagtttcctcataaaactctgggggagacgcccctcttaagactctgctgttgtttggaaatcacatcgattacaacccacaatcaattttcccctctagtcaactgcaaaataggattataggtcctattcctagaaagggtgcttagaaaaccattagcagatgttcacaacctgcattcccctaccccacattatcctggattccaacaaagacaggggagccagagtagctctgaaaccaggcctgctggagcgggaagtgaatcacttcccttcagtggcccaaaaacctggcaaagaggaatgatgccttggccccaacagccactgcagaggctggctcttaccccactggaaaccttcgtgtccctcccctacatgcctacccctcagtctgctgccctgcctctcctgcatttctctctactccaaaggttcccgtgcagagggcacggaggcaatccagactccctctctggccagccccccaggcttccagggcactaaggagcaaacacaaatctccctctaagctagaaggacggggcaggatgggtccaccctgcccatccgtactggattcggtagaaatgaagtccatgcacatgtgccatcttccttgtagtagtcctcataaaagctctgagagaggtttcatgtcctttttacagaaaaggagatggaggcttagagaggttactttaataagagagagagaagccttcttagagaaggtgaacttccaactagcatcagaagtcccggcaagaacttgaggggcacactgggagaacagtgagtttccccaaacttagctttcccaaagcacccctactagagcccacgaagtcctcaacactctagccacatgggctaccatgggaggctctagggagtttcggcacagaggataggctccttacaccacaaccaaagacttcagagccggatgaaaggcatgatgggagaacacggtcagccccatagcagacggttggagatgacagcctgaaaaccaaaacagcccacaggtgcttaaagaacacaggccctgcctaaaaagagtccattagccctactgctcctgtccaggttacttcacacacacatgcacatgcagatgcatgcacacgtgcgtacacgcacgcacacacacatacacatacacactcacacatatttcttgcagcaggcaagaaataagggagacttgaatgaagtgcagcagggggcctgggagagatgcctgcaggaaattgctcagagaagaatgcatgggattcagcaacccagaaagctgcaggtagagattgagggaaggctgtcagagggagaattgacttttgtttaataacagcacatccctacagagctgttcttcctgtgtcatgtttagacatctagtttgccctttgtgtggctatctgacccacaagcatctccatgtttggagctagatgaaatgtcagcgctggaaacattgctctgagaattttctgcataagaattatatttgaaattgtatatatagatgtaatcagcaagaaagagggtatagaggagagggggataaaagcaatgaatgatgccagcagcagaaacagagactgagtctgggaatctcctactgagtacctttccaataaactcctttctgcttgttaacgaaggcaaagcggtttgaaaggagaggaccagagtagcggtggagacctcaaagcagaaatcgctaataaccactgcctttaggagagccaaaccctcaccatttttattcttcagtcattctgctcaggaacaagctttcagggagtttggctgggtggctgcagtgatccacagacatgtcactcgaagtgcttccttggatcacagggaagtggccaatgattgtcccattttacacaagaaaattaaatggtcagacccagatgacttggcaagaccagggctaacaaatctgggtcccaggttccactgctgagaagcaggtcaagggcagtgcgtgcttcctggcctgggcccttgggacactgccataggctgcagaatggttttgtgttacagggctggaagtgctatgatttttttctaaaaaaacaacattacataacttcgcatgctgtgaaaacattcatttattttacatcttcatttcacattgttgcaatttaattttattgttactgatatccttctatacattaatctaatacttcatttggtccaagaagtcagacactgtgaattatgcccatcacccaaaattttatccaatttaacaaccttgatatgatttagaatatctttaagataataataataagagataaaaatgtttggaaaaaccccaagaaaaaagatgccagggtatgtttgatagcctaagtttgcatcacctatctacctcttggccagaagagaaaagaaaaccttcagtgaccatcctcccaacaccgtatccaatgagagaggaaagatatttcctcttagtaaagtcagggtgctttaccacgtgaccttaaccactcatacagagacagctacactgattttggggccagggtattatgtgtgagcttacctgtgactacttattcaagaaagcattctcagcagaacccagactgccttctccttcccatcttctcaaatccacatagagacaagggaaggtcaagtgtagagcaaacgcttaggggatgtgttgggtggggccatgctcaaagttcagtgcaacgcacaaagaactcattagtgattgccaagtgaacaagcaacaaccaaccatgaactcaaaatactcttggaaagcttaaaaatataccccccttggggatgagggattccaaaaactcttgggaggcaggaatcctgctggcacccccaatgcgctacagccatggcccactgtaataaaagatggtccctaccgtgcatctgcactgcctaaaagcacctgggagaggaactttccacctttgacaaaagtaggtaggcttaatgagttaatgttttcaaatgttttctgagctctttgatgggagcagctgtgccactacaaagcagcctttcatctccaggacagaaatagtctctctctttctaccccctctatccagctaagcctaaccaacctcagcaaagccaccctctccaagacaaaaggaaagggaacagctcacgcagaatgtaggctctgatcctgtcttcctttgcctaatgcaccctggctaatttttccctaatggtatcatcagtggcacatgcggccctgctgcaatgctctgtgccatctgaacaacaggagaaacccttctgctggaaagtgaatgcaaacagattctaatcaataggaagagctcaattagagcaagttcagcacacttcaaaggtgttgctactttctcgctggcttatcccacacagcccttttgaggggctcgaccttgggagctggctggcaacaagagctgctccagacaactctgtaactggaccagcaaacttcccaccatactggatgtcttctacaagccagaagagggggaaaactccttatttcagttcagagccacatttctcctcctgcacaccccagcacctccctcaggacactgagggcaacttagtgaagacctgtgccttggccactggtctgaaaggccctgggtatagcagtgcacagatcatcacaaccacctgcagaaagtcagctgcttcttcaatctgcaaggaaaagactccttcccaagagacctctggtaatgaggtgttaagagtataagagctggggaagtgaggcagaacaggaaacatggcccaaatgccaggcactgttttctgggttcagatcttggcactaactacctatcagctgtggaatcttgcaaaggttacttaacaatcctgcagctaggtgctattgtcatctctggtttataaaggaaacaaaggccgaggtgggcggatcacttgaggtcaggagtataagacctggccaacagagtgaaactccatctctactaagaatacaaaaaaatcagctgggtgtattgctgcacacctgtaatcctaggtactcgggaggctgaggtgggaggattgcatgaactcaggaggcagaaattacagtgagccgagatcataacactgcactccagcccaggtgacagcgagaagactgtcttcaaaaaaaaaaaaaggacaaaaatcctctcaatatctcaaagccttaggaagaaagaaaactatttagcacagtgccaggtgtacagtaagtgtttgataaatgctggctaatgatatgccttctgctgctgttagtaataccgatgtgttggaaaatgttgagaggaactctgaaaaagagctagcggccagaattttcaggaaaagctgcctacatcctcctctttgagtttcataaggcacatttctgtggtactttctcaggacttttattgtgttgaagacaagtttgagaaacactgacttaaataaatttatatatttttgctacaaagaatatctgcagatagatcaagatggccaactagaggaatctaccactcatctccttcacaaaaatgacaaaaacaacataaataactgcattttgagtagagtacctaaaggaaaacactggaagtgacaaaaaccctctgaagcacgaaaatctggaaagccagcatagggagggaagcgaaacacctgaccaggatctgctcagggccaagggaaaggtaagcaggggatcccccatggtctccatagttactgaggctgcctgcaatcccagctacaggctagccccgcagtccccataggccctgagcccagtggaggaaactacctggagtccacaaggtcacattgctccagagaagggacacatgttctccacagtgggacggagccactgggggagcgtattctgccctggaggccattagcccctatatatacatctccatgtcgctgggtccctgccgtcattccactgtgcccacaaaaaaggctgagtgctgtgatcccagctagacttgacggtgcagtcatcatccctgcccccgagcccatgcagtgctctacaatccagggagcaggcatagcacagaggggaggatgccccagaactaggggagccagtgtacatgctgagcagagacctagagctgaccacctcacatctgccgccaccaacaacccctccaggggcggaggtgctgcacatgtgtgcacatcctccgggaactaaagtgcagccagtccagtgattgccatcacagaaagccatacctcctccagaggtggagctgtgcatgccatgtgtccacaaggagcggcccacctggtgcccaccaatgcgagtaaccccacccactccagggccagagccaccaaatgccatgcacatcccccagaaactaaggagtgacctgttcagcagtgccagcagccccacccccaaaaccagtggagccactgtgccaggcacatccccccagggcctgagaaccaccttgtcctgcaacccccctcaatcacaaacaatgctgcaccactgcctttacaaacacccgcaatttaagattctgaggaaatctcagacactgctggcattaattacagtcaaagaaatcagacagggactacactatgatgcccatctagaacaaaagccaaagcaccctacccaacagacaccataggaaacatctataggaaaaggtatttctccacaaaagtaactccatatatttggaaggcaagactatactccaccagatgtgcagatatcaacgtaggaatgaaagaaacatgaaaaaacaagtaaacataacacatccaaagagcacaactctccagtaacagaccccatagaaaaagaaacctataaaatgcctgaaaagggattaaaataatatcaaggaaactcagtgagatataagagaacacaaaatcagaaaaacaatttacaatccaaataaaacattcaacaaaaagatataaaacagaaccaagcagaaatcctggagctaaataactaaatgaatgagataatcaagagcttcaaaaatagactgagcaaaagaaaaaaaatttctgaacttgaagacgagtattctgaaataacctagtcagaccaaagaataaaaagggtgggaagggaattaaaagaatgaagacagtgaagaaagcctacatgacatatgggacaccatcaactgaataaatattcaaaatttaggagttccagaagtaaaagagattttaaaaagctattcaataaaataatagctaaactttttttttgttcccgcaagatggtagattggaggcttttaacacgcctcagccacttggaaatagcaaaatagtgagtaaagatcaactctgaagagttttaattcaagaaggaaaatgtgaattcaccagaatagtgaaggataccccaaatcccattgagaaaaaggtaggcaagcagcccttgtgatagtgtttggctgataaacatgagtgaagcccctgtacataaaaagggcaaagagttttcctctatgactcacctttccacttgggatctgtgcaacccatgccaagaaaggggaccctgattctcccaaaccctggaactaccaggaggagaggctgggagacactgagagggaaagatattggaaaatgctgcatgcattttcccaaccttggaccacggggaagatgtcatttttaatccacactaatacaaagtcagtcattgtttggtgacctaacaatgcagccacgcaggcattttagtctcagactagagactggagcacttgctttggagtggagtagaagcctcccagctgcaatggagcagctagtgtggaaaatgccccagcagtaggcactggaattgggcaatctcccaccacaggactagagtgggaagagggttgctgaaactgtggtttcctctgagaggtgagacttgcagccaagagcagctttgtgacctggaactggtctgtgtgtcattgcttggagtcccagcattctcccccgagaccatggtgtagcagggccctctatgctctatgcccaggcagatatccaggcatttgaagcacccacttccctacattagcagcctaagctgcctcacgcttgctaagcagagaatttggtacagtggggctctgcttcacacccaggcagatttccaggcttaaggagtacccatctgcctggattagcagtctgagctacttcatcctttctatgcagagaccatggtggagcagggtcaactccactccttgcccaggtagatctccaggcatatggagcatccacttggctggatcagcagcctgagccacctcaaccttcttctgcagagaccatggtgcagcaaggctgtctctgctccacagtcagagatctccaggcactcagagaacccactcacctgatttgcttcttgagctgcctaccccagtttcctacaaagaccttattgcacaaccaattactccactcctcaccagtagatatatttccaggcaatcaaatacccactcacctagattagtagcctgagctgtctctccctcccactgcaaagaccttgttgcagcgacagtttttccagggcgaactcccaagtatgcagcatgcttgctcccctggataagagcctgagccacccctctcttcccatgctgagatcttggcgcagcagcacattctcttccccatgacgggacatatcaccaggccttcagtgcacctgccccccggaatagaagtatgaactgttatactcttaccacacaaagaacttagtacagcatcactcccttcacttcacattcagatataactccaggcatttgtcacacctgctcccatggataaggagtttcagccaccctttgtctcatgtaaagactttgtagtggcagcagtctctctgctccttccccaggcatatcatctcacacggggcatacctgctcttccagagtaggagcttgacccactcctcccatcccctgcaaagaccttgtttgaacagcagtttctccactccctcccagagcatgtggcacatctgcctgccttaatgagaagcctgagctgcccttcccttcaggtgaagagaccttagtacaatggcactctctcagcttgatgttcagacatacttccaggcatttggagcacccattcttctagattaggagtttagggcattcccctctcccttccagaaacttggggcggggaaggttttccaattccacatctagacacatctctgagtccttggcagcttccactgcaaaagctggtgcttgtaactgccattaggtctgcctagtttggccctgcccatcttggtgcccctacctaggactgagcagggaactcagatcattgtgcattccaaagatcagccccttgcttgaggcaagagagagcttcctccactaaacaaggatcaagtatattcctgtcaagtttggatgcagccagctgttacccataagcaccacctactggcccggaggttgaaagataaaacataacaagaaatctgaaacaggtgcacagtactggggaacaagataagcttcctaagacctctactaccctggccagagaaggaggcaatgagcctgctcatatgcccaaaatatagttactgcaaccagcatttagcaaagttgccaaataaaagctatctaaaaccaaggaacttaaaatagactatttggtactgaagacacctggaaccaaagccataggaccctacataacaacatatattatggataccttcctcaggggtagaaaaaagatgccatccaaacaaaagcaaactcaagaaaggaaagatagtttatccacatgagaaaaaaccagagaaacaattctaaaagtatgaaataaaaaagtattacaacacccacagagtgaaacactaactctccagcaacagatcctaaccaagataaaatctaaataccaggtaaacaattcaaataatttattttattttgtacttttttgagatggagtctcgctctgttgcccaggctggagtgcagtggcacaatcttaactcactgcaatctccacctcccgggttaaagagattctcttgcctcagcctcctaaatagctgagactacatgcgcacaccaccacgcctggctaattattgtatttttagtagagacgaggtttcaccatgttgaccaggctggtcttgaactcctgacctcaagtgatccacctgcctcagcctcccaaagtgctggggttacaggcattagccactgtgcctggcctcagattattgattttaaagaagctcagtgaaatccaagagaaagctgaaaaccaacagaaaagaaatcagattagcaagtcaagacataaaagaagagataggcttcattaaggaaacagaactcctggaaataaaaaattcactgtagcagttataatatacagttgaaagctttaacaataggctagaacaagtagaagaaataatttcagagctgtatgataggtctttcaaattgacccacacagatgaaagaaagaaaggaaagaaaataatttaaacaaatcaacaaagccttcaagaaatatgttatgtaaaccagccaaacctacgagttgtaggtattacagaggaagaaggaaaaaaagttaaaagtataaaaaatatatttgaagaaataattcaagaaaacttctctggttttgtgagagattaagccatccaggtaaaagaagatcagaaaactcctggaaaacacattgcaagaagaaatacactaagacataaagtcataagactatccaaaggcaatgtgaaggaaaaaattctaagagtagtaaaagagaaaggtctaatcagctataaaggaaatgccatcagattaaaagcagactattcagcagaaactttacaagccaaaaaaattggtggccttttagcctccttaaaaaaaaatgggccaggtgcagtggctcacacctgtaatcccagcacttttggaagccgaggcgggtggatcacgaggtcaggagatcgagaccatcctggctaacacggtgaaaacccatccctactaaaaatacaaaaaattagccagacatggtggcgggcacctgtagtcccagctacttgggaagctgaggcaggagaatggcatgaacctgggaggtggagcttggagtgagctgagatcgtgccactgcactccagcctgggcaacagaatgagactccaactcaaaaaaaaaaaaaaatgccagccaagaatcttatatcctgccaagctaaccttcacagatgaagaaataaagtatttcccaaacaaacacggaggaaatttgtaaaaattaaaatggccttgcaagaaatactcaaaaagttctagacatgaaaataaaaggatacttgctatcataaaaggccatataagtaaaaatctcacagattctctaaagcaattatacaatttaaaccccaggggcaactaggcaacaacactatgacagaaacaaaacttcatatattaatattaaccttgattgtaaacggcccaagtgctcaacttaaaagatacggagtgggaaactggattaaaaaaacaagatccaaccacctgcagcctataagagacaacacctctgggctaaagacagctacagactcaaagtaaatgggtgaacaaagatatatcatgcaaaaggaaaacaaaagaaagcaagattagccatcctcatatcaaataaaaggaccttaaacaaacaacagttataaaaaagacaaataagagcattatataataataaagagcttaatgcaacaaaaagatacaactatccaaaatacacgttgatatgacttggctgtgtgctcacccaaatctcatcttgaattgtgtagctcccataactcccacatgttgtgggagggacccattgggagaaaactgaatcatgggggtggttcccccatactgttcttgtggtagtggataagtctcacaagatctgatggttttataatggaaaacccctttcgtttggttctcattttctctcttgcctgctgccgtataaaacaggccttttgccttccaccatgattgtgaggcctccccagcaatgtgaaactgtgagtccattaaaactctttttcttcataaatcacccagtctcgggtatgtctttatcagctgtgtgaaaatggactaacacacacatgcatccaacattggagcacctggattcataaaacaaatactactacacctaagaaaacagattgatagaaatataataatagtgggggacttcaacaccccactgacatgacaagacagatcactgaggcagaaaatcaacaaagaagctctggacttaaattggactatatagactaaatgaacctaattgtcacttacagaacattatatccaatgatcgcagaatatccattcttctcaattctgcatgaatgttccaaaactgaccatgtgcctgaccacaaagcaagtctcaataaattttaaaaacctaaaaatcatatcaagcatcttctcagaccacagacaaataaaattaggaatcaataccaagagaaatgctcaatactacacaagtacacataagctaaacaacttgctcctgaataacctttgggtaaacaacaaacttatggcagaaattgaaatctttttcaaaacaaatgaaaatagatacaatgcaccaaaacctagggcacagcaaaagcagtgctaactggaaagtttataatgttaaacacctacatcaaaaaaaaaaaatagaaagatgaaaattaataacctaacgtggaccctcaaggaactagaaaaacaagaacaatccaaaccaaaatctatcaagagaaaagaaagatcaagcagaactaaatgagattgagatcaataaaataatttatacaatgaacattccaactgataatacacaaaagagcatcagagactagtatgaacacctctacacacataaaatagaaaacctacaggaaatggatagattctgggaaatatacaacctcccaagatacaaccaaaaagaaataaaatcctgatctgacaattaatgagtaataaagctgaatcattacttccaacaacaataacaaaaaggcccaaaccagacatattcaaagcaaattttaccagatatataaaggagatctgttactaatcttattggaactattccaaagtattgaaaaggaaagatccctccctaactacttctatgaatccagtaacactctgataccaaaattaggcaagaacacaacaacaacaataaacacgacaggttaatatccctgatgaacataaatgcaaaaatcctcaacaaaaatactagcaaacaaatccaacagcacatcaaaaagataattcataatgatcacgtgaattttattccagagatacaaggatggttcaacaactgcaaatcagtaagtgtgattctttacataaacaggactaaaaacaaacaccatatgaaaatctcgatagatggagaaaaggcattcaataaaattcaaaatcccttctaaataataaatcctcaacaaattacacatcaaaggaacatatctcaaaataatgagaaccttctgtgaaaaatccacagccaactttatactgaatggagagaggctgaaaacattccctactagaactgaaggaagacaggatgtccactctcaccactcctattcaaggcggtactggaagtcatagccagagcagtcaaggcgtaaaaaaaatgaataaaatacaaattagaaaagaggaagtcaaattatctcagtcccttaatgatatgatcatatacctaaaaaaacataaaaactcctctattagtttggcagatttgagaagtgaagctatcaggtcctgggcttttctttgctgggaaactttttttgtaccctgaggtgcatcactggattatttgaaaactttctactgttttgatgtatgtgttaattgctataaaattccttcctactgctacttttactgcatcctataggttttggtatgttgagtttctattttcatttgtttccaaattttttttgatttccttaatttcttcattgacccagtgattgtccaagagcatgttgtttaatttccatgcatttgtacactttccaaaataccttttgttattaatgtcttttgtattccattgtggcctgagaatagacttgatatgattttgatgttttaaaatttgttgaaacttgtattgtggcctaacatgtggcctatcttggagaattttccatgtgctgatgagaaaaatgtgtattctgtagctgttggataaaatattctgtaaatgtctgttaggtccatttggcctaaagtagaattaaaattcaatgtctattgatggcctgtctagaggtctgtccaacggtgacagtagggtgttgcagtctctagctattattgtattagagcctaacttcttttttaaacctgttaatatttgttttatatatctgggtgccctggtgttgactgcatatatcttcttggtgaaatgactcctttatcattatataatcatcttctttgtctctttacagtttctgacttaaagtccattttatctgatgtaagtatagctacttctgctttgttttggtttctgtttgcatatttatttctatcccttcaattcaatctatgtgtgtcattaaaggtgaagtgactttcctgtaggcaacatgtagttgggtcctgttatttccttttttaaatcctttcagccagtctgtaccttttaattggaaaatttaatctgtttgaagtcaaggttattatttataggtgaggactgacctctttcattttgttaattattttctggttgttttgtgtattttttgttcctttcttcctttcattttattctgataaaagattttttttaactacagatgcaattccatgacttgttaatggtctgatcaggatttctatttcttcctggttcaatcttggggggctgcatgtgtcctagaatttatctatttcctctgggttttctagtttgtgtgtatagaggtattcatattagtttctgatgttcttttgtatttctgtattatcagttgtgatggcccctttatcatttctgattgtagttggaatcttttctcattttttgttgattaacctgcctagtggtctgtcaattttgcttaccctttcaaaaaccaactttttgtttcattgcttcattgcataatagttattttttcatcttaatctcatttagttctgcttgatctctttgctttcttttcttttgctagatttgagtttgaattgttcttgtttttctagtttcttaaaaattttgaaactttgatcaaagaaactgaagagttcacaaacacatacaaaaaatagaaaaaatatcccatgttcatggattgtaagaatgctgttaaaataactacactaccccaaaagatacaaagattcaatgtaattccaattgaaataccaacaacattcttcacagaaatagaaaaagcaatcctaacatccacatagggttgcaaaagatcccaaacaactaaagcaatcttaatcaaacaaaaacaaaaacaaacaaaaaacaaagttggaggcatcatactactggactacaaaatgtactacaaaatgttagtacatactgtactaaccaaaacagcatagtacttgcataaaaacagacacatacacaaacggaacagaatagagaacccagaaataaatccatttatttacagctatctgattttcaacaaaggcaccaagaacatttagtggggaaggaacagtatcttcaataaatggcactgggattatccatacccagaaaaatgaaactagactactatctctcaccatatacaaaattaactcaaaatgaattaatgacctaaatgtaagaactgaaactaaaaaactactacaagaaaacataagagaaatacttcaggctaatatctgtagaaataaaacctcaaaagcagaggcaacaaaagcaaagataaatgggattacataaaagtaaaaagctctgcacggcaaaggaaacaatcaacggagtgaagaaacaacctatagtataatagaaaatgtttgcaaactatttatccaacaagggattaatatgtagaatatacacaaggaactcaaactactcaacagcaaaaaaaaaaataataaaaataatcaaagtagcaatacaaatggacaactatatgaaaaaatgtacaacatcataataagagaaatgcaaatcaaaaccacaatgagatatcatctcactccagttagaatagtgattatcagaaagacaaaaaaaaaagcagttgctggtgaggatgtggagaaaagaacttttacacacttttggtgggaatgtgaattagccatcataaaaacagtatggaagttgctcaaagaactaaaaatagaactaccatatgatccagcaatcccactactggtctcagtcatatgtagaagctaaacaaattgatctcccagaagtagagaatagaatagtggcaactagcagctaggaagggaggagagatagagagaaggtagttaaaggacacaaaaattatagcttgataggagtaagttctagggttctacagcattgtaggctgaccataattaacaataatttactctatattttccaatagctagaagggaggactctgaatgtccccataatgaaattataatggtttgatgtgacagatatgctaattaccctgatttgatcattataacttacatacaggtattaaaatatcacaatataagccataaatatatacagatattatgtgtcaattttaaaagaatacctgtaaacatcaagatatatgaatgttatgaagatcaaactgagaactgcaaaatcagcatattctccactcagtctcttcttctcccaaataataacatacatacctgacagacatacaagaccttgtgcaacatgtgagcaggaacgggcaggtagcaggctgaggtgtctgcccagctcagtatttggatattaacctccactgtatttcactttttccttcctctagactggatcattccaggctagagaacattgttaatttatcttctatttgcttttgaactgagtacatttcagggtttagttttgtttttgttttatctatatctagctacatatttcatctctttaaaaaataaaaagaaaattgagctgagacaattgggttgttaactctatcaaaaaactttgcagccttaaaaaaaaaataaattggatcagtccattcactgtcctagtatctgtagccccaatttaaagccttcctttttaattacaaaaatctaaattgagaaaatgcttctccccaggaagattttaatatacgggaacagggcacagtcaccctaatacaaagccctaagcagcataggtgggccccaggacccctatgaaatatttcttgcactgtttctcgtgcgcaaaaagtccccagagatggccagcaagactctgcaactttcaattcattattccatacctgtccttctaaacctctatgctgggaccaaagtcctactctaccttaccttaccagggattgtagggttttcttatggtcaaaacaaaacaacaacaacaacaacaaaaaccacacacacacacacacaaagaaaaacccttagaagcttaggtccatatcctataaaaagaatgtcacagttgcactttcaatccctatgtcttgaccatctgagctttcacccatagcagaaactcagacttctgcccacatgtgacctccctgaggataagctggacttgtaacagatagaggtatggtaaagaggcagtcgcaattagcccttccattttgtccccataaggaggtagggacacagtgctttagttccttcccagactccaagatgccctcctacagccagatctcactcaagtgcaaggcagtaaaaatgttaggagttcaggctgtagagtcagcctgctctgggtttgacttccagttgcatgatccaaagaaggtggcctaacatctctgagactcattggcccagtttaacagatgaagaagctaatagtcgtctcacaagccatagtttggagagagagagagagagagaacataaatgaagctctcagcttctggaacataattaatgccagccaacattaagaacttatcatgataattagtaactaattaatggggaacgaatgctcacaaaaaggagggaaataaaaagcacagaatcaatcaacagggaaatagttaaatgaactttgttgctttcgggtttaggaagcactggcacacacattgcctcattttattatggtgaacatgtaaaagaggcaggtaccattattcccactccacatgttggaagtaaagctcagagttgcaaagaaaacgagtacttaaacaaaggatttctcagcaaggcaaaatttacttctgcagaagggtgctgcttgcatgtctggtcaccacaagagcacaccgaacaaagtggggaaggggcttttatccctaatgcagtttgtccctgctactgtgtcctgtatccattagctggagttggactgcacaatttaagctgaaccccactggctaacttgagaggtgcaggaacgtggttataccaatgggaagggcagttttggcaggaagagctgttgcgacaggaggggtaattcgcagaatgggttagcatatgtggtctttgcagataaggactggcgggaaagttgtttactgaaactaagacagggaggcataagggataaggaagttggtttgggcttgaagtagggaacaaagaacaagggcactgaacaagctaaacctttgaagaggaacttcttttgtatctgacacacagactagaaaaagtgtcctagactgggcatggtggctcatgcctgtaatcctagcactttgggaggctgaggcaggtggatcacctgaggtcaggagatcgagaccagcctggccaacatggtgaaaccccatctctactaaaaatacaaaaaattatctgggcgtggtggtgggcacctgcaatcccagctacttgggaggctgaggcaggagaatcacttgaacccaggaggcagaggttgcagtgagccgagatcacaccattgtactccagcctgggtaataagagtgaaactctgcctcaaaaaaaaaaaaaagttctaaaaatgtgggtgggtttgccagaggccatatgaccaggaggtagagaatccaggacttgaatccagatattctgtccctaaatccactaagctaagttgtttcccacggaaaactgaactccttttttataaccttctaagagggctagctttttaagcaaccagttctgaaagcatgttcgctaatgaagagccctcgggaaatgccaaggaaacctttgcatgggtgacccttatcttgcctccgtgtcctggccaccagaactctgctgttcttcattattttacgttgaaacaagatatgcccccaaatttcctgacaccttttccatccaccctactatatttaaaaccaccagctctgtgcaggggatgggaactctggaacaagttcatgggactacttcttaagaaattaaatggtaatttttaaaaagccacacccgaagaaaaaaacacacacacacaaaaacaaaaacaccagtgtagtaacatagatatgacaaggcctgagtgacttttgagattaaaagtgaaacatttcttagaaaatgatgattgacttgatgccttagactctccagcacaattgctggcctgtggcctcactgcggctgtgttctcgagcttgggtcctttctgactcacccgtagaccacagtgacgcctcctaattaagactttacctcttcttctcgccctgccaagtcactgtgcacccaataaagtctctttagaatactttcaacgtcattgccttgtgttcaatgtattttgcatcgtattcaacactctctgtagcccaatctcaaactaactctccgctctctctcttactgcttcactacacataccatactgtggccagacaactctccaagggaagacctctgcttaaatggcagagtgaagtgtttcctaaagtcctctaaaattctctctgtcctcccaatccccttcctaaaaatctgtggtcaagttaagaaatgttgcttggtaatccttgatctagtttcctcacagttgttacattattgcctggtggccatatttgcagaaagcccagaactctgaatatttagagttgggtgaatttttttttcctgacctctcccacctactagtcatatgatcttgaacatgtgaaaactcatctgtgaatattttctcatgtaaaaaatgggagtaatacagctttgcctatatgcttagagtctacttcagaagcgttccttaatgtctaagtctcttaaaattcttatgagaatgtctgagcattccccagtggcatatctggacagtgctctgtagaaggcattctactgggtgtgtgggagagtgaaagatacgtaagatctagctcctgttccaatgaacctttgtaggtgaggagactcctaccaaaaaagtctgtactactgcacattaatagtcaaatgataaactatgatgtacagagaaaagagaaggcactgtagactgggtggtagggggatcagctcatcctggtctgtctgggacttcccttgtgttagcactgaaagttccatgtcctaggaaacccttcagttgtgggcaaaccaggagggccgatcaccctacaatggttaaggaaggcttggcagtgattggagtgtgtctcagaggggcattttaggtggtaggaaacacacaaattgcctctctactaaacaaacatacacccaccctatgactcagcaattctagcgatataactgtgagagataagttcatggcagcattatttataatagccccactgcaaccaagcagatgtccaccaataggagaagggatatataattgtgcatttatagactggactattaaatacaacacaggtgaatttctcaggtatagtgttgagtgaaagaagccagacttatgaaaatcagaatctgtatgacttcttccatatgacagaagagagaataattaggagctattgattacaaggggacacaagggagatttggtgtgctagagaggttctatgccatgatctgggtggtggttacatgggtgtgtgtatatatatataagttaatcaagctgtttacttaaaatttgtgcattttattgcatgtattattcctcaaaaaaaaattttaagctgccatttattaagcctatgtgctctgcacagtgttaaacatttttatcctcacaatcctgtgaggtgtagacattggccattttatagattaggcccagaaaaggaaaaagaaaatttctcatgaccaagtgtttctcaaaaagtgtttcaaggaatagcagttctgcaggtgttatctgaaaaaaaaaaaaaagaaaagaaaaaaaaaaaaggcttgtgttcaactatgtttggggaactctgggagtaaaagggttaaatgtacctttttactgcaggattaatatgccaatgtgcatacctgatctcttttgtaaagcctccaaggtgtagtaaatactacagagaaatacctgtagaccaacatttacattttgagaaaatgatttagccttatattgtcaatatttgctttaatattctgagatttttgccctatgacattatgcagttaattttatagtataagcgctgcactcatctaacattaccagctcatatcagcccctcctccagaaaagcttttaggtgatactgttcttccctcatcacagcataatgccatcagcaaattagttattacatttcacagagcctagtggaaacctctcctgccaattactgagtagtcaattacattctggacatatgcattttacactgattaaaaaaagaattacagccgttgattttgcttttcaaattaagagataacatctatgtaatatagaattacagtgacttgactcaataaaatagtgatttaaaagaaaaaaaatgggatttggagaaaaactgtaaccaacacattatccaaaaacaaggaataagaaatgttgttagcctttctaagccccaaagactgaaagacctcagggaactgtaagttctaacctaatactaatactaccttgaaaagccaaaatgttaatttcctccagcactggagaggatttgtctcactagaaaattttagatataaacaccaagtcaaaaataattcttcagtgactctgagcattctgccaatgacaacagatttaaaatgcattttagaagcaatgacagggaattaaatagatttctagtgctgtaaagctgtaaagcttaatattacttcacaaagtgttaaagtgtctgatcttccctcagctcatttggtaccttgtgagcactgaagaaaagctaagtgcaggggcactttattaatgtattggaagccacatcaatggtagtatgcctaacaccttccaaaaagttttgagaaatctaaagtaaaacggcatgtgagttcctaaaagccttaacggaaaatattgtcagctatcacctacaaagctgcctctagctaaaggccagctataaattagagatatttaattttgcagtaacactcacaaaaaactacaatgcattatgcttcccctgaaaataatgcaaagattctaattagtttttaattgcttgctaaattgttcagttttattcaaaatggcctttaaagagctatgcaccaaaaatacttccaatatttctgtgagaaagttgtcagccctcctagcctgaaggcagcagaaattgaactccacaagtgcacaggcatggggggctcacatgatttttagtaagggaggattttatttcaaccacctgtgacctcaccaaaacaaacaggtctgagtgcagaaaacaacttgatgtaaacaaatggaatctgggttgcctgagattctgggatgtgaatgcgttcacctggaaaagataatgtcctgggaggtcactctacccagactcccctttatctaaatattctcaaatgtttctatggtcaaacaccaaccattttagttaagatttatacagaaatgagccagagaaactcttataaatttgacctggttacccactggctactaacagagtcatccacttcctttggaaatggttccaatcctgaagattcaagacaacttcagctttcagtcaagattgagtaacagttatcagatttaccctcctgccttaaataactacaaaagtggacaaaatatatgaagcaatggttttctggacattaggtatcaggcaacacaggactgtgatacgtaagaagggaaatagaaaaggtgaactctacaattataccagcttcctacctgaaggcagtttccaggccttagtacagggaggggaaatgaagctcagctgattcaccaattcagggagacagagtcagagttcagaggacaaggcagccagaatttgtaaggcagagcacaggagatgagggaaatgcagagccagagagcaccagaaacctgcagacggtcccctcaaggattacttgagttccaatctgtatggtgtgagaagataatactcgaggctgggaaagagccaccagaaaggaataagcaggaaaaatctcactcctaccagccagagtgaaaagaccacataatacatgagggaccagacagatttctttaaaataaaggggaatcacatgaggtatctaaataagtcaaaatcatagaaacagaggttggaagatggttgccgggattgttgagaggagacagaattagtgtctaaggggcatagagtttcagttctgcaagctgaagctctggaaacctgttgcacaacaatgtaaatatactaacattactgaactgtacacataaaaatagttaaggtggcaaatttaactttatgagtttataaccacaattaaaaataaaatttaaacataaataacaataaaaatgaataaaaaggaaaggagggcctaaattagcccaagactgctctgcatgtgcccaaacgaagcttacaagcaagcactgaaaggatccaactaatcccaaataactactccacaaagaagccacattacttaaagaaataaaaccaatcacagcaataatatgaaattcttcgtattcatcatccagtcagaaaaaagacagcaaagaaatggaaaaatatgacccatatccaagagaaaaagtaatcaatagaaacagagccagaggcaagagaggtaataaaaagggcaaataaatatactaaaatggctattataaatatattcaatatggtcaggagagaaaaacatcatcatgatgaagagagagagtaaaaaccatttagaaatgaaaaatacaatgtctgaaataaaaaattcacggaatgggattaacagtggtgtaaacagtgcagaggaaaagatgagcaaacttgaaaacatggtactagacattatccagaaagaaaaaaacgacagaatgaataaagcaccagtgacatgtgggataaaatgaaagaagtaacatgcatgcaattacagtcaaggaagtagaaaaaagagaaggtggaatagaataaaaatatgaagaaataaactcatatgatgaagtacaataaactccttgcagaataaaaatgaagaaaaccacacaaagacacgataatgaaatgttaaccagtaataaaatgaaaatctgaaaaaacatccaagagaaaaagatacatgacagcagcattgtcagaaattatgcgagccaaatgacagtggaggaacatccttaaagtactgaaataaactgtcgattcaggattccctacccagcgaaagtcatctttcaaaattaaagacatttttcaaattaaagctgggagaattcagttgtcagcaaaacttaagcaaaagaaatgaataagatactaaacagaaatttgagcctttaccaaagagaaaagagcactggaagtggtcattatattaacactattaaaaaattttaaatctttttaaaggataatagtttcaaacaaaaataacaacaacatcttgagaagtttataaacatatgtaaagagtacaatgtatgacaacagcacaaacgataggtgggaaatggaccttacacagaaggggataaaatattatttgcaggtagtacgtgcatgttgtaaaccctgaagcggggtcagcaaactctggcacaggctaaatccagcctgttatttttgtatagttcagaagctaagaatggtttttgcattttggaagaggtgagagggaaaggaaacgtgaaagcatctacgtcacacaaaatctaaaatatttgctacctggttctttacaaaaaagttgctaagccctgtcctagaataaaatttctctaccttggtgctactgacattttgagccagataatcccttgttgtgggggttgtcctgtgcactgtaaggtgtttagtgggactcctggcctctacccaatagatgccatgaacacccacccccagtagtgacaaattcaaatatgtatccagacactgacaaacgtcctgggggtgagagagaaatctgactgcagttgagaactactgcactagagtacatctatttttttttttttttaaataaaaaagaggtagagctgggccagccatggtggctcacgcctgtaatcctagcacttctggaggccaagcagggtggatcacctgaggtcaggagttcaagacaagcctggtcaacatggtaaaactccgtctctactaaaaatacaaaaattagctgggcatggtggcacttgcctgtagttccagctacttgggatgatgaggcaggagaatcacttgaaaccaggaggtagaggttgcggtgagcagagattgcgccactgtacttcagcctgggtgacacagtgacactccatctcaaaaaaataaacaaataaataaataaaggtagagctgataagccaatagtagaaataaaatgaattcttcaaaaaaaatttttaaactctcattccaaaagaagtcagaaaaagaaaaaagatttttcagataaggcataagtataaaccacagaaaaaatattgataaattagacttgatcaaaatttaaacttctgctcctcaaaagacactgctaaaaaaattaaaaaccaagccacggacagaaggaaaatatctgcaaaacacacatttgataaagtactagctttctcccaccgcccaaaaaaaaaaaaaaaaatatatatatatatatatgtatgtatgtatgtatgtatgtatatgactcaagacaacctgatttggagacaatataaaaagaaggcaaatatgcacatgaaaatatattaaacatcattaataagagaaatccaaattaaaaccaaaatgaactaccacgacacatccacagaacactgaagatttaagagacggacaataacaagtgctgacaaagatgaggagcaactagaactctcaggcatggctggtaagactacaaaatgggacaatcactttggaaaacaatttgaaactttacaatgaaataaatgtgcactcactatatagcccagcaatctcataggtatttgccccaagagaaatgaaatatatgttaaggcaaaaattgttgcccaaatattcttagcaactttatccatgataatcaaagagcatgaacaacccaagtggtccatcaactggtaaatgaataaatagaaagaaacaaactactgatacaagaaacaacagatgaattcatcttaagggcattatgcaaagtgtaagagcaacagcaaagactatatactgactcatttcttttctatgtaattcaagaataggcaaaactatagtgacagaaagcacatcagtggttgccaggtcgaactatgggcagaggaacttgcctgcaaaagaaaatgaggggacttttggaggtgatacaaacattcaatattatgattgtcatagttacacaactgcatatatttgtcaagacccagagaatcatttaaaattggtgatatttttattgtatcaaaaaagatgatataagctgatttaaaacaaaaatagccaggaagcctttagaaataagaatggagtaagagtgagactacattttcccctagtcattagtaggaaaaacaacttgctacaattcaggatgtccgggaaatagtccttctggtcaaatttggtagggtgctagtgctttgggtccttgtacaagaatatacatttaactaaaatactggttgagagtatttaggccacagggttaacagtaggcacacatgggaatttagtattattcccagtaaacggggaaagaatcaactcttcaatagacagtatcaagagaactcctgaggcatttagagaaaaacagttccatatcatacagtacacaaaatcaaattacagatggaatacaaatgtaaatttaaacaagattataaagtcactagaagataatattaaatttttaaaatcttgtgatagataaggcctatgtaaacaagtcacaagacccagaagagtagatctgactacaattaaaacttaaataaaataccgtaaaccaagttcacaagctcagacagcccaaaagatacttcatacatgaaagtataaacatttctataaatatgagtataggttacttataaatatacttatatatatatgatgcatttgtttaaatactaaacgattaaaagccacactgtatacaatacctataaatcaggagaagaaatggataaattcctcgacacatacactctcccaagactaaaccaggaagaagttgaatctctgaatagaccaataacaggagctgaaattgtggcaataatcaatagcttaccaaccaaaaagagtccaggaccagatggattcacagccgaattctaccagaggtacaaggaggaactggtaccattccttctgaaactattccaatcaatagaataagagggaatcctgcctaactcattttatgaggccagcatcatcctgataccaaagccgggcacagacacaaccaaaaaagagaattttagaccaatatccttgatgaacattgatgcaaaaatcctcaataaaatactggcaaactgaatccagcagcacattgaaaagcttatccaccatgatcaagtgggcttcatccctgggatgcaaggctggttcaatatacccaaatcaataaatgcaacccagcatataaacagaaccaaagacaaaaaccacatgattatctcaatagatgcagaaaaggcctttgacaaaattcaacaacgcttcatgctaaaaactctcaataaattaggtattgaagggacgtatttcaaaataataagagctatctatgacaaacccacagccaatatcataatgaatgggcaaaaactggaagcattccttttgaaaactggcacaagacagggatgccctctctcaccactcctattcaacatagtgttggaagttctggccagggcaattaggcaggacaaggaaataaagggtattcaattaggaaaagaggaagtcaaattgtccctgtttgcagatgacatgattttatatctagaaaaccccattgtctcagcccaaaatctccttaagctgataagcaacttcagcaaagtctcaggatacaaaatcaacgtacaaaaatcacaagcattcttatacaccaacaacagacaaacagagagccaaataatgagtgagctcccattcacaattgcttcaaagataataaaatacctaggaatccaacttacaagggatgtgaaggacctcttcaaggagaactacaaaccaatgctcaaggaaacaaaagaggatacaaacaaatggaagaacattccatgctcatgggtaggaagaatcaatattgtgaaaatggccatactgcccaaggtaatttatagattcaatgccatccccatcaagctaccaatgactttcttcacagaattggaaaaaactactttaaagttcatatggaaccaaaaaagagcccacatcgccaagtcaatcctaagccaaaagaacaaagctggaggcatcacactacctgacttcaaactatactacaaggctacagtaaccaaaacagcatggtactggtaccaaaacagagatatagatcaatggaacagaacagagccctcagaaataatgacgcatatctacaactatctgatctttgacaaacctgagaaaaacaagcaatggggaaaggattccctatttaataaatggtgctgggaaaactggctagccatatgtagaaagctgaaactggatcccttccttacatcttatacaaaaatcaattcaagatggattaaagacttaaatgttagacctaaaaccataaaaacctcagaagaaaacctaggcattaccattcaggacataggcatgggcaaggacttcatgtctaaaacaccaaaagcaatgccaacaaaagccaaaattgacaaatgggatctaattaaactaaagagcttctgcacagcaaaagaatctaccatcagagcgaacaggcaacctacaaaatgggagaaaattttcgcaacctactcatctgacaaagggctaatatccagaatctacaatgaactccaacaaatttataagaaaaaaaacaaccccatcaaaaagtgggcgaaggacatgaacagacacttctcaaaagaagacatttatgcagccaaaaaacacatgaaaaaatactcaccatcactggccatcagagaaatgcaaatcaaaaccacaatgagataccatctcacaccagttagaatggcaatcattaaaaagtcaggaaacaacaggtgctggagaggatgtggagaaataggaacacttttacactgttggtgggactgtaaactagttcaacctttgtggaagtcagtgtggcgattcctcagggatctagaactagaaataccatttgacccagccatcccattactgggtatatacccaaaggattataaatcatgctgctataaagacacatgcacacgtatgtttattgtggcattattcacaatagcaaagacttgcaaccaacccaaatgtccaacaatgatagactggattaagaaaatgtggcacatatacaccatggaatactatgcagccataaaaaatgatgagttcatgtcctttgtaggcacatggatgaaattggaaatcatcattctcagtaaactatcgcaagaacaaaaaaccaaacaccacatattctcactcataggtgggaattgaacaatgagaacacatggacacaggaaggggaacatcacactctggggactgttgtggggtggggggaggggggagggatagcattgggagatatacttaatgctagatgatgagttagtgggtgcagcacaccagcatggcacatgtatacatatgtaactaacctgcacattgtgcacatgtaccctaaaacttaaagtataattaaaaaaaaaaaaaaacctcaaatccaatagaacaggcaaaagatgaactggcaattttcagaaaaataaacctgtgaaaatatagtaaatgatgagataatcaaatcaaataacagtaatcaaataaatacaaattacaatgtttttttcattcatcagagaagcattttttaaaattattaatattcagtgttatgaaagcatgtcaaactgtcactcccatatactgtgggtaggagtataaaccagtgctctgttgttcaagacactctggcaaaagctatcaaaattttaaatccacaaccctcaatccaaaagtcttcatccaataatctaaacatagactatcttagagaagacacaaagtgttgcattttgaatcctttttatgtatctatttgtaataatgaaaaactggaaatttgaatacccatcaatactggggaataggttaagtaatgactcatccatccacagcagacatagatgtttttgcctgcaaagcagttcttccatcttcttctagcaacagaaccgccccctttcccctagaaactgcccttccatcacctgggaggtatcattcatgaggctctacccactctctatcaggacagaaatgtgatttaatgggaacagatgacttcatttctctggttgtatagtgagtggtcaaaaaacaagcggaaaatatgacccaagcagatgctagaagaaaggagtctctctctccgagtccataaaaactggggccatctttggcaccacgtcgaacaaagccaacctgagagtgacagccacaccagaaaaggcagaactaaaaagatggatccaccaaccatgcctaaaatcagctcttgtcctcagacttcctagttccaggaccaaacctcataaggcctgcttgagctgagtttctgtaacttataactgaaagaattctggcaatggagtagaacacaaatacacagggatgaggtggatctgtatgtacagacataattttccacaaggtgttaagggaaaacagcaatagcaattttcagagcattattatattatgcctggtttgttgtttttaaaagatatacatttttctgttaatagtgagcgctggcaaaagaggagaatattcattttaacactaacacataaaagaccttgaaaaatattatttatacacattttttaaaatcacacaataaaataaaacatcatgcataaaatttgcatcaaagcccagtcatcaaatttaccttaatttccaaagaagcccatggaatatttttcctagaaaggagaagaaatagcagcagcaaactgaattataaagaaacaaaagtggtattgctcccatgaggtcatcagtgtttgatatataactttcttcatctccctctggaaagccaaatccagaaaataaatatttcaacatccttctacaactccaggaaagggagatatacttgaggtcaaatgatctctgggcagtttttaaaaatatattcatgtttacatctatgttgcaatgacagaccaagaaacctaggaaaggtgatacttgtgaagctcaaatgtagtcaattaacatacagaattttgctacctgccatattcaggttacactaagggaagaccagaaggacaggacacagggtaactcaatcaacacagaagactatcctttttccacatcagtgttttcatctaaaatgccaaatccataccactccagggtgctctcagtactccctacactgtgctgagatgtgtgactccccatgactgagaaaaaaatctactctctgtaacttaaacaagaacgcataaggcctattcactaataactaattatgtgaataaaaattaatattagcttagatttaaactaaaatcaaaataaactctgaaaaactatcatgctataaacaggaacaaggatggtattaacttcactgacctatctgtgtattgtcttgacattctagaaaggtacaaaagaatatataaaatctaaactccaagataaagtgaaaattcaattgaaaaaccaacatgattctttaagatgaataaatggctttatcttgaggcatcatatctagagggaaaaagaaaaaagaataaatggtttttaagtcaatatttgactgaagctgatgcagaattaatcagtattacattttaaaactctttgcaacaggatttttaaaaagaagtaaaaaagaaacctttcaatgatcaaacaataaatctaacatatatccttctacatttagtagcatcttaaaaataagagtttttttttttcaaatttaagaaacaaatataaccacacttagggaaaaaaaaataatactctttctgaaacaccaaaaagataaaatactgtgggttcttaagataattacatatgccacactggcactatggtccataatgggtttgaaaaaataacaagatttgattttattatttcatcactataatcttaatcattaggcatattaatgtcacgtatacttttttaatatttatttttaaaagctatgtctcaacaatatgacaccaaaaacacacagctgatacaggttgtataggtaatcattttgactgtgaaaaaatatgatcagaatactgttacaataaaggaaaaataccttctttttaatcattctcattcagcaacagtaaaaatgctctatgtacacggtggctctgaaggacacatttcatctctttttcagacctgctgtgctatctattgctgttttggtgattacacagttcaatatgaaaatgcgtcccattcagattctcaatagtaagtctgattaggcagataactttccaatcataaaagcttttattttaggacaaccattatgcaaatctagggtggaaatcggactcactgtaattgggataagaagacactctgagaagaaggctgtacatgtgacactgcatttggtgcactcgtcttgcattctcttcctttcttcctcctctttgaagccccagattaaagtataattacactagagagttacaaatgggcttattagaagagaactatatgtttaagacagcaaggctttcagataagaaatctccaaatattttctgttatatgtttttacagtctttcttataaagaaggagtgtttgatgcgcaacacctgctaacagaaataattctacactcaagcccagtagaataatcaaatataaaatacagacataaagcaaactacaacggcaacagtgattcttggggcagcatgtgcaaaatacagtattttgctatctaatatcattgtgatcagaaaagaaatgtgccaaaacactgtttctcattccacttgaactggatccccataattccaacaaacatcacttgtgacattaggttgtcatcagcttgcatgatccccagttcacttaaccttttcttcttcatctggcctttttgtgtaaaggcagaaaccagttcatttacaatttccctcaacttgctcagaaaggtcagatcttgcataaaactccattttagcaggtgcacattgcatcagctcctctggatctactctttcagctacatctgcctttctacttgtctgaattttaagtgctttattttctggataaacaaactatgacaaagttcagtatgcaagctagcccaactaaaacataacatttctacacagtctgttagagctttcaagtgttttctgccaagtattcctgctgtcatctaactggagtttacaaattccttgccataagaatctcaatgagtagttttttccaattctgtgaagaaagtcattggtagcttgatggggatggcactgaatctataaattaccttgggcagtatgaccattctcacgatattgattcttcctatccataagcatggaatgttcttccatttgtttgtgtcctcttttatttcattgagcagtggtttgtagttctccttgaagaggtccttcacatcccttgtaagttagattcctaggtattttattctctttgaagcaattgtgaatgggagttcactcatgatttggctctctgtttgtctgttattggagtataggaatgcttgtgatttttgcacattgattttgtatcctgagactttgctaaagttgcttatcagcttaaggagattttgggctgagacgatgaggttttctaaatatacaatcatgtcacatctgcaaacagggataatttgacttcctcttttcctaattgaataccccttatttctttctcctgcctgactgccctggccagagcttccaacactatgttgaacaggagtggtgaaagttcatatggaacccaaaaagagtctgcattgctaagacaatcctaagccaaaagaacaaagctggaggcatcacactacctgactatactaaaaggctacagtaaccaaaacagcatggtactggtaacaaaacagcatggtactggtaccaaaacagagatatagaccaatagaacagaatagagccctcagaaataatactacacatctacaaccatctgatctttgacaaacctgacaaaaataagaaatagggaaaggactccctatttaataaatggtgctgggaaaactggctagccatatgtagaaagctgaaactggatcccttccttacaccttatacaaaaattaatttgagatggattaaagacttaaatgttagacctaaaaccataaaaaacccagaagaaaacctaggcaataccattcaggaaataggcatgggcaaggacttcatgtctaaaacaccacaagcaatggcaacaaaagccaaaattgacaaatgggatctaattaaactaaagagcttctgcacagcaaaagaaactaccatcagagtgaacaggcaacctacagaatgggagaaaatttttgcaatctactcatctgacaaagggctaatatccagaatctacaaagaactcaaacaaatttacaagaaaaaaacaaccccatcaaaaagtgggtgaaggatatgaacagacacttctcaaaagaagacatttacgcagccaacagacacatgaaaaaatgctcatcatcactggacatcagagaaatgcaaatcaaaaccacaatgagataccatctcacaccagttagaatggtgatcattaaaaagtcaggaaacaacaggtgctggagaggttgtggagaaataggaacacttttacactgttggtgggactgtaaactagttcaaccattgtggaagtcagtgtggcgattcctcaaggatctagaactggaaataccatttgacccagccatcccattacagggtatatacccaaagtattataaatcatgctgctataaagacacatgcacacatatgtttactgtggcactattcacaatagcaaagacttggaaccaacccaaatgtccatcaatgatagactggattaagaaaatgtggcacatatacaccatggaatactacgcagccataaaaaaggatgagctcatgtcctttgtagggacgtggatgaagctagaaaccatcattctcagcaaactatcgcaaggacaaaaaaccagacaccccatgttctcactcataggtgggaaatgaaccatgagaacacttggacacaagaaggggaacgtcacacactggggcctgttgtggggtgggggagggggagggatagcattaggagatatacctaatgtaaacgtggagttaatgggtgcagcataccaacatggcacatgtatacatatgtaacaaacctgcacgttggcacatgtaccctagaacttaaagtataataataataataataaaaagaaaaaaaaaagaatctcgatgagtgactgtcttgctctttatgccaaggtttcctgatcttcatacaggatcacaaattttgaactatttgtctacccttttcatcctacaatcttccccactcaacagatatttattggatatttactatctgttaaacattgtgttaggaactaggatgcagattggtaagacagtgctactttcctttaactcccaatctagcagcaaactctagatgagccccatgatcccagcccccggtattattttcatgacgattaaatggcaaaaggagtttgcactgcaatttgcaatgtaattaaggttcctaatcagttttctccagctggttgcaaaagaggaaaagaggaagtcagagagattcaaagcatgaaaggtttgccttgagggaggctctcttctgctgagatagaggggaccatgaggcaagaatctgagagcagcctctagaagctaagtgcgagccccagcaaatagccaacaagaaaacagagacctcagtcctacaacctacagaaatgaattctgttgatgaataacatgaatgtatttggaagtaggttcttccaactgagcttttcttttttttttttttttttttttgagatggagtttcattcttgttgcccaggctggagtgcaatggcacgatctcggctcactgcaacctctgcctcccaggttcaagtgattctcttgcctcagcctcacgagtagctgggattacaggcatgcgccaccacacccggctaattttgtatttttagtagagatggggtttctccatgttggtcagtctggtctcaaactcctgacctcaggtgatctgcctgcctcggcctcccaaagtgctgggattacaggcgtgagccactgtgtccagccccaactgagctttcaaaccagagcactgtccagctgacaccatgacttcacccttcagacctgtgaagaaataaagaacttgctcttcaggagtggaccctgaaggatgacaaggagtactcttgaaactgctttaaactttccttaactcggtcaatgcttaattcttctctatgactgagatttagtagactgagatctatgtcatcgctttgaagttcacaaatatccagtgagttagctcacctttgctgccaagaaaggcagatgacagggaggcacttccttctaccaataaaaaatggaggcaaactccactattggctccagtaaacacagccctcaacctggcacatggattaccccacctccaacctcaacagatatcagccggagccaccactgctatcacacacccatcctcattctatacgtttatagaaagccaaccacagtaagaagggaactgaaggaccacagaaaccacaatgtcaaggttttgaatgaacagttgaactagctgactttgaaagttcctttctccctcagattctataatgttatagctttaccaaaacttctctttctccatgcccaaacatattctggcaatcttaaaaaaaaaaaaaaaaaaagcaggaagactcagatccttaatcggattttaatgctgaaaaaaaaagtaaattaggtctgatttttctatctaaaattcctaaatatcgcataccttcagtttcatcttgggcactttcttggaggttagagaaaactgtagctttcaccaagaaaacaccataaccttcattttatgatattactcaccaaggatattttgggaatgtcataatgttcatctaagaagacctgtgacactgaaaacaaatgtttcaaggaactgtcttttcaacactgcctgcttaaaaaatcttgccttttttcacactattctaaaaataaagcagaaaagctatgctgctatgctgattcacatgctgtagcacagtgtgatgcagcattcctctgtcatttctgcagatctagaggcaacaaagtattcttgcaaaagactttcaatcattagctactgatattattagaatttatatactatttaggcctttcaaagtcggaaaacaataggacccaacatgggaatgtaataaagcataatttcttaggtgaaatcattccaacctttagaaagcaagtgtctcggccaatgctcagcttaatgaggagcccttccttgcaacagcgggtccattctcacgcagggaacccaaacttactcccaggatatatttctatgccagcaccctgcaagttacaatttgagataataacaatcagtttcaaaaaggcaggaagaattttattacaatcactttttaggcttttacacagtgcaaatgtaaagcacaaagataaagcattttacagataagctttattaggtattttaaaccaacacttcatttgttccagattagcaagtcattagcatgtatcattttcaaaccacccccaccccaccccaacatacaggctgagtgtcaacattcaattcctgttccactgtctttcattctagataaatcggttttcagattctgccaaaagtagaaatcctttaacaattttgttgaaagatgcacttaatcaaaatgaccattctctcatctactcaattagtgaagaacagtatttgagtttagtaaaatattataatttgagactagaaataaggccctatatttaaaaaattccagttataagataccccaatccaacttaaaaatcacttctacgaattaagcaatggccttcactgctacacaggttaaaattaacaactagttcaagtgtaatttatatagagtaaccagaaagattcaaacctggtccaattctctcacactgtctcctcacaccacatggcaccaacaaaaaagaaacagtaataggaataatttatttcctaatgttatgcaaggcactttaaaaagcaaaatgagtcactcaaacctctatagttatttaggaaaccacttaggaataatttaatacacaaaatcataggtgaagaagagctggtataactactcatgacacatctactgcatgtatgatacttttctaagagcagtcatataccatgagaaaacatttattattatttttccctttgcatatgcctgaaccatatatgtacacactaacttatctcttctgtagagatgtttttaaaaatctgctaactgggacttcagaaaaaaaattttcagctcggggttatgtgcaaaaaagacacaggagtgattatattaaaaatacatatacaaatagttaaatatcgaacttcaggaatcacataaaatttaaaaagaatgggaacagcagctatctggcaaatgatatgatcatattcaaacttagttataaagatgaacaaataatttggcaattaaaaagtaactgccacttgtgaaacaatagagatgtctctattttttctgctaggtataaccaaaaaccatgggcattgtatataaaataaacataagataactgaaaaatggaaagaaggtggcagaccagcagcagacctcaagacccaagaaagaacaccaacacagtgggaagttcccagggttttcttttcacttcataatccccagacttggagcttatgtagctggcaatccagtatacaaacagacaaagaccaaaaatgcccccaaaatactgctttgtctagtcaaaggactaggcaacctagaaagatgaaggggtgggttgcccctccacacctgtgggtgtttctcgttaggtggaacgagagacttggaaaagaaaaagacacagagacaaagtatagagaaagaaataaggggagccagggaaccagcgttcagcatatggaggatctcgccagcctctgagttcccttagtatttattgatcatttgtgggtgtttctctgagagggggatgtgtcagggtcacaagacaatagtggggagagggtcagcagacaaacacgtgaacaaaggtctctgcatcatagacaagataaagaatcaagtgctgtgcttttagatatgcatacacataaacatctcaatgctttacaaagcagtattgctgcccgcatgtctcacctccaggcctaaggcggttttcccctatctcagtagatggaacgtacaatcgggttttatacggagacattccattgcccagggatgggcaggagacagatgccttcctcttgtctcaactgcaagaggcatgccttcctcttatactaatcctcctcagcacagaccctttacgggtgtcgggctgggggacggtcaggtctttcccttcccaagaggccatatttcagactatcacatggggagaaaccttggacaatacctggctttcctaggcagaggtccctgcggccttccgcagtgtttgtgtccctgggtacttgagattagggagtggtgatgactcttaaggagcatgctgccttcaagcatctgtttaacaaagcacatcttgcacaacccttaatccatttaaccctgagtttgacacagcacatgtttcagagagcacggggttgggggtaaggtcataggttaatagaatctcaaggcagaagaatttttcttagtacagaacaaaatggagtctcctatgtctacttctttctacacagacacagtaacaatctgatctctcttgcttttccccacaaaagacagaaaacagacaataatacctccattccagccaaacagcacaaaataaaagagcgaccccattcccatcatgccagccaaggttgagaggaacctggacttttgccctctgaaggctgtaaccaggtatcccaacactcccactggggtggaatcagtaaaagcaaaacagggagccaggactttcatccccactaactggtgacaaggccctctctgcagcagtattagtgaagactgaggagcctgggcttgtacccccacctagcagcaacaagatgcctgccccctccccattggggtggtgtcagagcaagcctagtggagattacaactttcacaattggccagtggtaagaagaccagccccatataccacagtgtcagtggagaccaaatgggaagctagaattcccactcttacccagcagcaacaaggagctcctccacccagcttgagtatcaacagaggctaaggggaatccatgacttctacctcaacaaggtaatggccacctacccccatcttttatctttctgcagaaatgtcagagaagttagagaagatccagactttcataatgtaatacaaaaaatgtccaggattcaaatgaaaattacttgtcataccaagaaccaagaaggtgtcaaattgaataagacaatcaactgatgccaaaaccaagatgtcagagatgacagaattagctgacaataatttgaaagcagccaggataaaaatgcttcaatgaggaattataaacatacttcaaacaaatgaaaaatgagtctcagcaaagaaatagaacacagaaataacccaattaaaattttatttttattttttatttcaatagctttaggagtgtaatatagtttggatatttgtccccacccaaatctcatattgaattgtaatcgccaatgctgagggtagggtttggtgggtggtgtttgagtcacggaggcaaatctctcttggcttggttctgtcttttcaataataagtgagttcttgtgagatgtggtcatttagtgtgtgccccctcctaccccctttcacttgctcctgcttttgccatgtgaggtacctgctccctttttgccttccaccatgatagtaagctccctgagcctccctagaagctaagcaaatgccagcatcatgcttcctctaaagtctgcagaaccatgagccaattaaacctcttttctttttaaattacccagtatcaggcatttcattacagcaatgcaagaacagcctaatacagaaaactggtaccaaggagtggggcattgctttaaaaacacctgaaaatgtggaggcagctttggaactgggtaatagcagaggttagaaaaagtgtggagggctccaaaaaagacaagaagatgagaaaaagtttggaatgtcttaaagactggttaaatgattgtgaccaaaacgctgatagtgatagggacaatgaagcccagcctcagatggacatgagaaacttactcaaaactggagaaaaggtcatgtgtgttatgccttggcaaagagcttggctgcattctattcatgccctagggatctgtggaagtttgcactacagagtgatgacttagggtatctggcagaagaaatttctaagccacaaagcactcaaaaagtggcctggctgctgcttccaacaatctacacccagatgcaagagcaaaggaatgactttaagttggagctttaaagggggggcagagcataaaagtttagaaaatttgcagcctggccatgtggcagagaaagaaaaagctttctgggggagaattcaagcaggctgcggaacaactacttgttagatacttgcgtgactaaaagggatccaagtgctaatatccaagacactgggaaaaaggtcttgaagccatttcagagctcttctcagcagcccctcctatcacaagcccaaaggcctaggagggaagaattgtttgggtggccaggacaaggttcccaaagcctgcacaacctcaggacagtgctccccacattctggctgctctggctccagctgtggctcaaagagttgcagatactgcttgtgcctccaatccagagtgggtaagccaccataggctttggcagcttccacatggtgttaagcctgtgagtgcacagagcgtaagagtgaatgaggcttgctactctctacatagatttcagaggacatacagaaaagcctggatgtccagacagaagcctgctgtaggggaagagccctcatggagaacctctactaaggcagtgcctacaggaaatgtggggatggaactcctagagtccccactggagcattgcctagtggagctgtgagaagcaggtgaccaaactccagatctgagaatggtagatccaccatcagcttgcaccctgagcctggaaaagccacaggcactcaacagccagtgagagcagctgcaggagctgaactctggaaaggcacaggggaagagctgcccaagaccttaggagctcaccccttccatcagtgtaacctgggtgtgggacacagagtcaacggagattattttggagatttaagatttcatgacttccctgctgggttttaaacctgtatgaggcctgtaacccctttcttctgcctggtttctcccttgtggaatgggaatgtttacccaatgcctatagctccattctatcttggaagtacataacttccttttgacttgccttgttcagatgagactcagatgagattttgaaccttaaacttttgaactaatgctggaataagttaagactttaggggactatcaggaaggcatgattgttttttgcaatgtgagagagacgcgagatttgggagggtccggggcagaatgatatagtttggatatacatttttccctgcccaaatctcatgttgaattgtaatccccaatgctgaaggtggggcctggtgggaagctcttggaccatgggggcagttccctcatggcctgatgctgtcttcatgatagtgagtgagatcttgtgagatctggtcatttaaaagtatatgacacctgcagtccctctatctctcttgctcctggtccagctaggagctgcaatgtgccagctccccctctgccttctgtcataatagtaagcttcctgagacctccctagatagaagcagatgccactagaagcagaagccactatgcttcctatatagcctgcagaaccattagccaattaaacccctattcctatgaactacccagcctcacatatttctttatagcagtgtaagaacatcctaatacagagtacacatgctttttggttacaggatgaattatagagtggtggagagtctgggattttagaatatccatcaccaaaatagtacacattgtacccaacaggtactttttcatccttcaccctccttccaacctcgcctattctgagcctccaatgttggtgataccagtctgcaagcctctgtatacctaaagcttagctcccacttgtaagtgacaacatgtagtatttgattttccactcctgagttacttcctgtagaataatggcctccagtttgatctaagttgctgcaaaagacattatttatttttcatagttcattattttctgagtagtatttcatgatgtgtgtatatgtgtgtgtatatatatatatataaaacacaaaaataaaaattttagaactgaagaataattaaatacctcaatgataagttcaacagcagaatgaaaagaacagaggaaagaaacagtgcatggaaagacagaacaataaaaatttaaaaattaccctatctgaacaatagagagaaattaaactgaaaaataaacgtaaactgagcttcagggacctattggactataagaaaagatccaatatttgtgtcattacagacctggaaggagaggagaaaaaaggtgaggctaaaaaggaaataatgactaaaagctcccacatttggtaagacacaataagcccacagagtcaagaagctgagcaaactccacacaggataaactcaaatgaatccatgaaatgatatatcataattaaattactgaaagctaatggcaaaaacaaaaaaaaatattgaaagcatcagtgaaaattttacaccttagccattggagagaaattgtgattgacagcatcagaaaccatggatgccagacaaaagaggcccagtattatttaagggtggaaagaaaagaactgtcaatccagaatcctatacctgataaagatattcttcaggaatgaagaaatcaaaacattctaagaagaagagaaactaagataattagcaaccagcagatctactctaatggaatgggtaaagaaagttctctgaacaaaagagaaataataaaagagggaatcttggaacatcagaaaggaaaaaggggcaaaagcaagcaaaaataccagtaaataggctttccttctcctcttgagtttaaattatgtttgaaatttgaaatgaaaatattagtatcgtctaatgtggttctagatgtacataaaggagatatttaagacgattataaaaagaagaaaaagaaattgcagggagccaaaggcttgtgggacgtgaccaactcagcattccactggaggctatatgatcaaacaacaaactgtttttcatgaatgcaggatgtgggcaaactcatgactgctcctgctggcagaaggtttgctggaggcaatcactccctggtgctgaggttatctgccgtgacatctacagcctgttgttcgaggactgcattcttgcaagcctactctggaccaggcagctgaccccttctttcatcccccttctcactatctcttttgcctaataaatatggaagactgtgtaaagctcagggcccttgtccactagaggcaaggtgccccctgaccccttcttccaaatatactcttttgtctcttgtcttttattcccacattcacccggctttgtttggtccccctaggtctgtgcgggttacatagtggtgccccagtcagcgacagaatcgggtgctccacaagagatgtaaaaaaagcagagtttctctacttcacttgaactggtgaatgaagacaccagtaaactgtgaggctatgtacatatattacctgaagcgatcactaaaaaaatagctacacaaaaagatatattcaaaaacaaatgaaactatgaaaactgctcaggtaatccacaggatggcagaaaaatgcaaatcaagaaataaaaagcagaacaaacagaaaacaacaaataaaatagactaacgactaaacatcaataattaaatgtaaatggtctaaagacattaaaagacacagattgggagagtggattaacaacatgactcaactatatgctatctacaaccaaatttaaacagaataatataggcaagttgaaagtaaaatagtggaaaaagatatatcatgcaaacattaatcaagggaaggcaagtgtggttatattaatgtcagataaggtagactttggagcaaacaaaattaccagagacagataatgacattacataatgagaaatatgtttcaccaaaatgacaacatagcaatcctaaatgggcatacaacaaataacagaactgcaagatacgtgaagcaaaaactaacagaactgaaaagacaaacatatccatacttgtgcttagagattttagcaaccctatctcaaaaattgacacaattactaaacagaaaatcagaaagaatacagaaaaactcaataataccacctaccaatttgatctagttgacatttatagaatgaaatacccaaaaacagcagaatacatattcttttcatagggccactttacacataacaagacagaccacatcttgggccatgaaacaaacctcaacaaatttcaaagagttgaaatcatacacagtgttttcttacaaccatggaatcaaactaggaatcaacaaaaagataacagtaaaactcccaatacttagaaactaacacttctaaaatctgcatgggtcaaagaatgaaaatacaaaatataaaaatatgtggaacacagctaaagtaatgccaagagggaagtttgttaacattaagtgtgcacactagaaaagaggaaaagtctcagatcaataacctatgctttcatgtggaaaacatagaaaaagcaaaacaaacccaaaacaagcagaaggaatgaaatcataaaaacaacaaaaaccaaggaaattgaaaacagaacaatttttaaacatcaatgaaacagggttggttcttaaaagagagagaacaaacgaactaccagtatagattaccaaacagagattatcactacagaccctgccgacatcaaaagaataaggaaatactacaaaaaattcgatatatgtaaatttgacaacttagaagaaatggtccaatactgctaaaagcaaaaactaccaaaatttactctatataaaataggtcatttgaatagctctttacctattaagaaaattgaattcataattttaaaaattccaaaagataaatctcctggcccagacggtttcattggagaaatctattaaacatttaaagaattaacagtaattctacaaaatctcttttagaaaataaaagagaaaaaatacttcagagttcattttatgaagctaatattagtgatacccaaaccagacaaagacgggagtacaaaaaaaacaaaactgcagacaaatattctttatgaatatagatgcaaaatttcctcacaaaacattagcaagtataattcagcaaaatataaaaagattatacactatggcaaagtggtatttatgccattgaggcaaggctggttcaaaatttgaaagtcaaccagtataacctatcattatttttttttctaataataaaaatcaggtgatcatctcaagaaatgcagaaaaatacttgataaagaatttgataaagaatatccataaaaaaacttgataaagaatattcataaaaaacctagttaacctcattcttaatgatgaaatattgaatacactccccataacatgaaaaataaagttaagatatctactcttattcaaaatagtgctggaagttctagccagtgcaataaggcaagaaatttaaaaaaaaaaaaaaaaaaaaaaaaagcttactaatcagaaaaaaaaaaacaaaaaaaaaacgcaacttttgatacttatagataacatgattgtctacatagaaaatcccaaggaatctacaaaaacacttttataactaataggtaacattcagcaaggtcaaaaaatacaaaatgaacatacagaaatcaattatatttctatatactagcaataaacatatgaacattgaacttaaaaatatagtatgacaatctaataataacaagcaatggagaaaaaactccctattcaataagtggtgctgggataactggctagccatatgcagaagattgaaactgaactccttcctttcaccatattaaaaaatcaactgaaaatggattaaggacttaaaagtaagatccaaaagtataaaaaccctagaagaaaaactaaagagctactgcagagtatcagcagtgtaaacaacctacagaatgagagtaaatatttgtaagctatgcatctgacaaaagtcttaatggctagaatctataagaaaaaaaaacaggcaaaaaacaaacccatttaaaaatgggcaacggatataaacagacacttctgaaaagaagatatatgcatggccaacaagcatatgaaaaaatgctcaatatcagtaatcattagagaaatgcaaataaaagccacaatgagataccatcttacaccagtcagaatggccataattaaagtcaaaaaatagcagatgttggtgaagttacagaaaaggtcatgcttaaacactcttggtggtactgtaaattaattcagtcattatggaaagcagtttcaagatttttcagtgaacttaaaacacaactaccatttgacctaacaatcttattactggatatatacccaaaggaatataaatcattctaccaaaaagacacacaaactcgtatgttcatcgcagcactagtcacaatagcaaagatatggaaacaacctagatgcccatcaagggtggactggataaagaaaatgtggtaaatatataccatggaatactgaggcagacataaaaaaatcatgtcccttgaagcaacatggatgcaaatggaggtcattatcctaagcaaattaacactggaacagaaaaccaaatactgcatgttctcacttatagatgggagctaagtactcagtacacatggacacaaagatgagaacaacagacaacagaagctactttagcgggcagagagggaggtggataaaggtcaaaaaactacctattgggtactatgctcactacttgagtggctaaatcatttgcacatcaaaccccagtgacatacaatttacccatgtaatgaacctgcgcatgtacctcatgaatctaaaataaaagttgaaaaaaaaagtacaaaacacaaacaacaattgtatgctgaagactacataatgttgatgaaagaaatcaaagatctaaataaacagagaaatatgttcacagattggaagactcaacataacaaagatgtcaattcttcccaagtttatatacgagtttattaaaattcctttcaaaatttcagcatcatttcttgtggatataaaattattctaaaatttatattgaaaggcaaagaacttgggtagctgaaacaattttcaaagagaccaagtgggagaaatcactctatttgatttcaagacgtaaatacagctacaggtattagtgaagaaacaggacactgatcagtgaaacagaatagagaacacagaaatagacctatacaaatattcccaaacaatatttgaaaaaaatgtaaaaccagtttattggaggaaggacagtcttttcaagaaatggtaaaggagcaactggacatccaaaggcaaaaaaacgaaccttgacctaaacctcacatcttacagcaaaattaactaagaactggattacaactttatataaaatgtaaaactataaaaattttagaaaaaaataggagaaaatatttggaaatctacagctaggcaaagagttcttaaacttaacactgaaatgctcagtccataaaaggaaaaattgatgaattggacttcatcaaaaataaaaactttgctctgtaaaagcccatataaagaagataaaaagactagctacagcgcagcagaaagtatccgcaaaccacatacctgacaaaagactagtacctagaatatatatagaactcccaaaactacagtaaaaaaggacaaacaatccaattagaaaataggcaaaagtcacaaatagacatctcactaaagaggatagaagaatggcaaataagcctatgaaaaaatgttcaacaccgttaaccactacagaaataattaaaaccacagttagtactacacacctatcagaatggctaaaacaaaaaatagtgaaaacaccaaatgctttcaggatacgaagaaactggatcacttaaacattgctagtgggaatcgaaaattgtataaccactctggagaacagtctggaagtttccttaaaaaactaaacatgcaactgccataggacctacaattgtattcctgggcatttacccctaagaaataaaaagtatcttctcagcaaaatctgtacacaaatgcttacagcagctttactgataataggcaaaaactgaaaataatctagatgtcctccaatgggtgaataaacaaactacagaaccaccacacgttggactactacccaacaataaaaaggaacaaattactggtacatacagctactgggatgaggctccagagaattgtgttaagtgaaaaatgtcagtcccacaaggtcatatcccaaaaggaatgtgatttcatttttaaaacttttttgaaatgatgaaataacagaaatggaaaacagattaaggtttgccaacagttaaggaagagactgatgggagaggaaagtaagtgagtgtggctataaaagggcaaccagaggaatcgctgtggtgatggacgtgctcctcagcctaactgaatgtcagcattctggctgtgctacgatactgtggtttcataagatgtcaccactgggccaaactggtaaagagtgtacatacaggatctctctgtgttatctcttacaacagtagtgaatctacaattacctcaaaataaaaagtaattaaataaaagcaactgagctttgactgttataaaattgtttataaagtcataattttaagagcctaaaattctctgaaagttacagtaaattgtgagatttattatttttcttactaatctatgttttgaaaatgctacgtaagaaccttgtacaattgagcttgcatgacttagtagatataaatgtctgaaattctttgaagaaagagaataggagtctgcacttacatcttggtctcatattttatatatttatttacaacttaaactcaaactatttcccaaaaagagctcatcatatcttgtcaccatgtaaatccaagttcttcattaaaaatgtgcgtgctgtgcctcatgctacttcacatggcagcacaattttctgatggagtctccttatggtgagtgcctgtgatgaaaacacacagctgactgctttaagaagtaatgtaccttttccagtatcagggacagcctggagctgacattagatatagtctaaatatttaataacttccatttaaacttgaattcgaaattcataaaatacaaaacaatgaccgttttgagctattttctcacatctaaaagtaacattcttaaaaaagaatgacttgacctcagaaatgcaaaagcacttttcattaccacaaaagaatatcagagatcaactttgctcagtatcttggggaaaaaagatcttattcaagaaagaagacacagatcttaggaaacaaatactactgcaatgtgaagatagctagtttcagtctagtgctaaattgaaaacaatgaatacagaccactacgttggaaagtattaaaagaaaaagatgactgcaccgagaagaaattaatattaaactaacacattttcaagaataggctgaactattttttacttcagggtaagattcctaagttgtcatgctgtgtacataaataatcagccttccaagtacaggcataccttggagatattgtagtgtagtttccagaccactgcaataaagcaaatattgcaatagaatgagtcacatcaattttttggtttcttaatgcatataaaagttatttttatgagagaacaaggcaggaggatcacttaagcccaggagtttgagagcagcctggctacatagtgagactctatctctagaaagacataaaaatattagcctggtgtggtggtacgtgcctgtagtctcagctgctcaaaaggctgaggtggaagaatcacttgaccccaggagattgaggctgtagtgagctaggactgcaccactgctctccagcctggttgacagagcgagaccctgtctctccaaaaaaaaaaaataaaaaataaattaaaaaaaaaaaaggtatgtttatataatattgtagtctaagtgtacaaaagcactatgttttaaaaaaaagtataaaccttaatttaaaaatactttattttgctaaaacatacaaggatcatctgaccttcagaaaatcataatcttttttgctggtggagggtcttgcctcaatgttgacggctgctgactgatcaggatagtggttgctgaaggttgggctggctgtggcaatttcttaaaataagacgaacagtttgccgcattgacccctcctttcgaaaaagatttctcagtagcatgtaatgcgatgttatgatagcattttactcacagaagaatgtttttcaaaataggagttgatcatctcaaagccctcctctgctttatcaactacactgacgtactatgctaaatcctttgttgtcatttcaacaatattcattctctttaccaggagtagattccatctcaagaaatcatcttctttgctcatccgtaagaagcaactcctcacctgttcaagttttgtcataagattgtagcaactcagtcccatcaccaggctccacttctaattctggttctcttagtatttccactcatctgcagttacttcctccactgacttcttgaccctcaaagagtttgggagtgttggaatcaatttctcccaaacccaatgttaatgttgacattctgacctcctctcatgagtcttgaatgttcttaatgacatctaagtggtgaatccttcccagaaggttttcaattgactttgcccagatccatcagagaaatcactatcaattgaagctatactttatgaagtctatttcttaaatattaagacttgaaagttgaaattactccttgatccatgggctgcagaatggatgttgtgttagcatgaaaagaatattaatctcctcgcacatttccgtcagagctctcaggtgaccaggtgcattgttcggtaagcaatattttggaaggatttttttttttttttctgagcagtgcgtctcaacagtgggcttgaaatattcagcaaacaatgcaataaacggatttgctaccactcaggctttgttgttccatttctagagcacaggcagaatagacatagcataattcttaagggccctaagattttcagaattgtaattgaccactgattcaagttaaagtcaccagtaagagaattggcctgtcttttgaagctttgaagccaactaatgacttttctctagttatgaaaagtcctagatgcatcttcttccaatagaaggccatttcatctacactgaaaatctgctgtttagtgtagccaccttcatcagtgacttcagctagctcttctggatagctttccgcagcttctacaatagaaactactgcttcaccttgcacttttatgttacagagatgacttctttccttaaacctcatgaaccaacctctgctagccaactttttcttctgtagctcccttgactctctcagccttcacagaattaaaaagagttaggaccttgctgtgtaggcttatgcttaagggaatgttgtagttgatttaatcttctatgctgacaactaaaactttctccatattagtaataaggctgttttgctctcttattcatgtgtttggcttttgatgtgcctttctcactaggcttaatcatttctagactttgtttaatgtgagggacatgcaactcttcctttcacttgaacacatagatgtcattgtagggttattaattggtctcctttctatattgctttgtctcagaatagagaagcccaagaagagggagagagaagggggcatggctgattgttggaatagtcagaacacacacaacacttactaagttcaccatttttctatggtgatgcagttcacatcaccccaaaacaattacagtggtaatatcaaagaccactggtcacagatcagcataacaaatataataataataaaaacatttgaaatattgtgagaattaccaaaatgtcacacaaaggcataaagtgagcaccagttattggaaaaatgaggccaagtagacttactcgaagcagggttaccacaaaccttcaatgtataaaacattcaatatctgcaaagcacaatacaactaggtattcctgtactcaacagtggcatttcattaaattctatcttccatagaaagtaaagttttccttcaaagcctagaatgagtaaatacaccaaacagtcagacatttaagatttcttttataacaccatgctgaacaaatcttatgcctgagatgttaatatcctcattcatgcagtccacagaagtgtcacctttttccctcttttctatcacaatattaattggtagaccatatcctaaggaagagaacagaaacatttaaggtgggtgaggggaaatgtccaaacacaaaaatgtagaacacatttctctagtgcaaggggcttgaaatgataatgagaccagtcaacccagatgcatttaaataaagtcgatctccccacatatcttatttaaaccagggcatcaaatttttaacaataacaacttcccaatgtgtccccatactagcaagactactctatcagccatctcagaacagcccagcacaaaatgcacatacaaagctgccatgaaagttaaaaaataatcctaaggatctacaactgggtcaaagggctttaaagcattcagctctcttaagcttttgtctaactgcatgggtgctgtggaaggaaccttaagtatctgagattctatgattctaatacaaattacatttgaataaacctaagcagttctcaagattacctaattttaatattctcgtagaaagaatgacttaaaatctgacaaactgacttatgacagtttagctacaggaaaaaacagtctatttcattaatcaacaaaaagcattagctctccataaatcttaatcaaatcagtaatacaggccaagcctctgagtgggcttacaaaaacctggaatatcggaaaactaaagaactcgcttgactttcattataaaacagaagacaaacacatagacgaagctgtaagaaagaaagacctcattgtctaatgataagtccttgagtacatgaaagcagtaactgcagtaaacaggcaaagccactgaacttatccatacttgaagggtacagacaagcctctgggggcactagagaaggcaagatgactccatacactggaatgctaccagggtggactagaaatgactgaacagtgagtaattttgtttctgattctgtatgtgtctgcctgtactttgaatattttctacaataaccattgtttttttagcatcagaaaaattataaatagaaaaagaattgcatattgaagaaaaaacagatttttacacaaattacgtattcttatcaatttaaaacataaagccattacctaaagtgaacagattttctaaagaaagagaagcccaaccataagtactattaataccctgcacatagtaggtactcaatatatctcttaagtgttaggtatagattactatcagataagctttaatttactcataagctagtgctccatatattcacaccagagataccatttgattcctcaattctcagaaatgtcctctgttagtaaatttacagtcatttttacactcaactatcagaatttgataggttatttatgacactctggcaattacattgtaatttcctcaccaatctaagaactcttatctactatacaatttataatatgaatgttatttttactctgccaaaaaataaagtgtttttattgcagtgatttatcctgcacatgtgttacttatacatacacatctattataaatcaagtattggagaggagaaagaacaaaattaacaaacataaaacaaaaaagggagtgagatgatgtactagtgaacagcaggaaattaaactcccagccttgcttccattaagaagttttgacaagataaagatcaagaacacagcttaagcagttagtgaacagctgcacaagtcccaaaatgatatatgatttttttgcattacaagcttcattgctaacttgtagcagttttggtaaatagttgaataggtacaactaaatttgacacattacggaaatatacaagaccaagatgaacaattgtaaagtaatctgaacttaggaattactccaaatgaacaaaaagattataactggaaaagttatttttaatagatattgaagatatctattaaagcagataatagttatctattaactattatatatttaatattaatctttcaacattaacgttttcaaaagtatactgtgtcaagacacaaagtgtagcatttgtgacactcagcaaacttttagagaattaagataatttttgataccaatttcaagtaaaacgcccttcaccatatctctcacaaaaataagctaaatttaaaacaaaaaacaaacagccatgcactaagatatcacaatatctatgagataagagcaagtaacaaactaaaaaatactgaaattaaaaataatattgttgggaatcttttttttttaattctagaaatttgacatcctttccataaatcacctacgatctgtatagtttgcttcttcctcatggtcttttttctatacagccctgtaagtatcttcccaacatatacactgctacaaagaaccacaagtccacttactcaaaaactgggtcaactccttttaagcttccaatgcctttaatgtttcaaggcaattcaataattcatttgaagtgaaataggttgaaatcacattcttggagctttgacaagaacagtcatttattgtttacttaatcatgtcatgcatgagagtttggttgtgtcttccatacccaccttccaactcaatggagtcaacactgcactccattatgccacataccacaaaatggtcaggacaaacgataacagtgtcaccttcatagcaggcatttataacagataatggatcaccgaagaactagaaaacaacaacatatttgcaaatatacacccacatatggtgtggatctctgtccccaaccaagtctcatgtctcatgttcaattgtaatccccagtgttggatgtggagcctagtgggaggtgactgggtaatggggacagtttctaatggtttagtaccatccccctagtgctgtctcatgacagagttctcatgagatctggttgtttaaaagtatgtagcacctaccctcattctctttcttcctcctcctccagccatttaagccatgcctgcttccccttcaccttctgccatgattgtaagtttcctgaggcctcccctgccatgtgtccttataacctgcagaactgtgagccaattaaacctcttttctttatcaggtatttataggcagtgtgcaaagtgacaaatatacaaccccacaaagcaactcgagtattattccaagtgccttcatgtctcactctgaaaatggagccaacactgcacgctgaagcatctcctttggtagtggactgaacctaatgcatgcctggtaagtggctactgctgatgaaaggcagggttctcactacttcctatttaacagaaaaccacctctgggaagctctgtgtagaattcatgaaaacctatggtgaatcagaaggaaaaaagccacttgcagcaagacactcttcttttacctgaatttctatatcttcccccaaggcacctggcaaagcctgtccatgagtagggtccacagcagaccagtcatcatggtggaggagatctcatgggtggaacttctgacaactggatggacaccctttgcttagatgttagaattctgataaccaaacacataccatgaagaaaccaaacagacctaacagttctcagtaagatagcaaggaagaaaagatgctaactagctaagaattacaaaggcacacatacctcaacaaaggactctccatgagttttagcttttgcttcacctgttcaatctctgaatacaattttaacccttcaaccatggagatattttcctgctcagagctacaatttgccaaactgcttctcagattaaaaaatttgctgtaactctcctcacattgagacaacagattgtggtagtcacgtcctgaaggaactcagttttcaagaatgtcataatccctgagagtttaaaagcaaactgaaatccattgcctttcagacacattttttctcattaagaaagcccatggagtcctcaaagacccactaagaaaagtgctttataactcaggtacatgttaagtctctctgaatagtactctaagtggtaactgttgaaagtttcaaacaccacttcattgaagtcattaatttttcttcttttgaggaattgttttttcttagatccaaacatttgtgctttagaattacctaaagttcatattgtacaatttgtaatcattatttaataagaaattattttcttctcatatattagattcaaaatcttaataaggagtgggtggcaagggccaactggggagtaggggtatagagggaagtaaattgtttcacaatggttaagactgccatgtttttcagagatctgaatgtgattttaaaatgttttaaaagattaccatatttataggatcaaaaattagaaatgactcaaactgtctagtccttccttacatttaaagcactatataggcacaaaattatgttgaatattcccagagaaagaccaggggatttcaaaaaaataaacctttgagattttgaggggaaaaaaatgctgtcattattagagaatgattaacacaaaataaccttgtactggaccaccttactggcacttgaaatttattcatttacataaattctcaaatataatgacagaacaaaaagtatgtctcaatgtaataaaataatttataaatgtacagtcaatagatattaaattaatgggtttaacaataaaataaaatattgccattacctgtagttttaaaataattgctttatttttcagttaaatgtatatcaactagctgtgccttaggttagagcttctcaattctgatgaatattagaatcacctaggatctttcaaaaatacagatgctcaggccaacatccagagcaataaaaacgggcctctgaaagtggagaggtattttttaaagttccccaagcatgtaatgtgtagccaaggttgagaactattgtcttagattattatttttttaacttcgtcatgctcttaagaagatggggggaggggagaaagctgaacaaaatcctaattcatatcaaattatggtgaacactcaatatttaaaatgaacagaagattttattttcttgcttttccaagtaaatggattgggtaaagcttgaaaaagtaaggattttgtctactttggttatccacactcatttaaagatactctagaaatctactttgcaaataagaaattacgaaccaaaccactggtctattaagttgcgaagattaagactaaaattttaaaataagtttcttagcatttccaatatccatgcaagttagcttatttcttctcattagattgatactttacagtctagaaccagtgaaccaacatcatcttcagacccctaagttctgaagtagtgtgttttgaattagaaaggaaaaatatttgccacatggtgcaaaatcaagacagtgatttgatcttgcctgctgatagctctactcctatcttagcccaggaacctttttagagtctgcatacatgtgataacattccagtttctccatcaagtgccacagtttcttctccgtaactaaagacaattcctcccttatgctgtcccatctgccagtgatgtacaaggcatgtatggagatcattacttgtccacacatgcaaggctctcaaatcagaatacaattttttttgtccacatacagatcaaatttgccagatatgcattatatttacctaccattacattctacttcaatcaaaaccaatcactgctctttaagagcaagtgtatcaaacctagaaaatattcaagctttttgatgttctgggattgtactgaacacactatagaaaaataggaaatgcacaatagaaaaattagaaaggtagaaatcacagtcaacttatgaaagctgaaatcagacatacataattgtaaaccaggtagaaccattaaccagattttcattttttaaaaaattttgttattatttactatttaaaccaagagaaacttactaaatcaaatcaaactgcatgaaaatgtaaaggccttgtcttatataatgtcaaatcatctttcacataggaaaaacaaattaccttctacaattctttttagtgtgagttctaattttattgcagcattgcctgttaatttactgctcaggaatacaggagaaaattactggtcttacagcaccatctagtggaaagataagtgtcgcatgtaacaagatcagcatagaacaactacttaatttaggttgcatgattaattttggtatttttgaacggaaaagcttttccttgtcaaaatatgataaattagaagaatgcgtttaggtatttttgattcatctgttagtttaacctagtatgttttactataggaacttagagtaaagccatatactttaaaaaaaaagtattatttaagtttcaagcaaaaaagtctctataatgcaaataagttctttgtttttcaaacaattgtcattaaatagatgttcacaaacctcctgattttaggcttagtttataaacagttaaagcaggtttctctgcacttgttcgtttcatttaataacttgaaaaggggctgcactatttgtatattggtctatttctgtctataggcccttggagtaagagtatgtgcgtgtgtatgtgtgtgtgtatgtgtgtgtgtgcgtgcattgcgcatgtgtgtgtctcacaaaggtaaaattaagccatggtaactattttttcaatatgtacaaggtcagtaataaacacaatctcaattgaggtttaacacgtctgacaaaacaatcatatgcatcatccttttcttcatcccaactcttccaaatgttctggtagaaaaacctgaaaaataacttaatatcattcaaatttaatcactggctccaaatgttaggattctggagggatgagagctaaagaataaatcaaagcaattctcatatctcagagaatgctgcatatttgctatggttatcagttgagtcacacaagataaagaccttctttgaatcagctagaggggtttttctataacactcatttttttaaaactttctttttatcagaagtagtatttattgaccatctctaactgggcaggtagtagttccatttgttgagatagaaaacactgggagagaaacaggtttggggttcaaaatgaagagttgtgtctttgccatgttcaggctgagatgcctatctgacctcccagtaatgacgtcaaatgtacagagaaatatacaagcccagagatccagggaaaggtcagggctagagacataaatctgggaggtgtcagcatattaatagttttaaagcagtaaatgagatcatctagggacataatataaagcagcagttctcaaccctggttgcacattagggtcccccgggatactttaaaaaattgattccctatcccagaccaataaatcagatatctgcggagggaagggggttagcattcacatgttttttaaagctctctaagcactttaacaaatttttattacaaaaaattctaaacatacaacagataaaatagtatcatgaatatcatgtatccatcagccaacttcaagaattacccacttgggagaaatcttatttcatctctacctcaccaacctaccctctgctcctctcctctcatcatcctgaccctggcttattttgaagcaaatctcagatgtatcaaatcattcacaaatttttagtatgtagctctaaaataaatccttatgccaaaaaagttttaatttcttaatattaccaaatatccagtcagtactcaaattttcctaattttctcttttgctgttgttgttttacagttgacttgttcaaattaggatccaaacaaggccagctgtggcccttaatggatgcgtctcttaaatcacttttattctatacattaccccttgctctttttacccttgtaatttatttaatagtttcacacacactgaattttgttgattacttatccatggggtcatttaacatgtttttctgtttctttcctttctagtaaactgatagtaagatctagagcttgatgggcttcaggaaagactttttggcaggaatacttcaagtgaggtatgatgtacttgcatcgggaagcacatatagcaagtcctctaatatcagcctttcattgaatgcctttcactatataagggaataaacatcaattcctggccatagtcgcagtctgtgtggagttttcatgtttttcctatgtctgcatgggttttctacaggtactctggcttcccacatcataaagatgtgcatacgaaagatgagcatgctagctgaactggtgtgtcgacatcgtcccagtctgagtgtgggtgtgagtgcaccctgggatgaagtggcattgtgtctcatgctggttcctatcttgcaccctaagctgccatgataggttttggccacctgcatccctgaactggaataagcaggttggaaaatgaaagaatgaatatgaattattgtcaaataaaaaatcttaaattagacaataatcatacaaatgcacaacaataaacaatgcagtataaaatcactcagcgagtccatcaagttggtgacggtttgaaccacgtggtggtaaagggtactccttacaatttttactttgccgacatttattcctcaatttgaccaaccaccaccatgactgccgtgactcactgattcaccaaaaattgggtaaataattattttgtttttataatctttcttatatgtatacaggattcacatttatttcaatgttcaagattaaaattgtttttggtctttatttagaagtttggtgatgtttttgtgaccagaaataggccataggaactttaacttttgtttgtatctattagcctatggtaacattggttttgtaatttcgcttaaagttgaagtttccaagaacctgtcgacaacagtaagtgaagacttctataacgcctagccatctctttttgtgaggttaagactgatcaatggattcaggtgttgtcagcctgattcacccactatgaagttctctattagtttttcacctaaagattacagcagtcattgaggatcactgcctacaacctttatttcattagtggttacaaaatatggatattctatcattccttcttcatgtagtggttggatgtgtctataaggaaaatccccaagttattataatgtggttccaaggtagagtagatgagaaaaagaagagtaataggattgatcccttggtaactcgaacactctaaaaagttagagcatgagagaagagctaggcaagatgactagaaaaccaagccggtgagacaccaaatgaatagtgctgtcgtagaggctgagaggagagtgtgttaagatgggaatggaggaggcagagcaaggtagtggaaaagaaggctcctctgatcattctctgtgcaaggacaccaatttaacaactatccagttctttggtaagaactaaaaatcacgtgagcacctatagcacctggttttaacttcatatcactgaaaagaggcatggaagagatagaaaaaacagtcttgaatcgccgatgccacccctcacccaccatcctgtgtggtacagagagcatatctgggtgctgcaggagggagagcactgcaattgtaaggcattaaactgagctgtcctgccacagcagaaaggaaaactagaccaaactcagctgacactcacctatggaggcggcatttaaaccagccccagccagagcggaatcactcatcccagcagtccaaacttgagatcctgcaaaccttgccactgagggctaaagcactttgtgtctctaagtaaacttgacaggcacactaggccataaggactgcgactcttaggtgagtcctagggctgaactgggcccagaaacacagagacacagtggacttggtgggggcacacaacctactgagacatcagctggggtgtctaccggagtgctggcatcacccctcccctaaacccagactgcacagctcacagctctaaaggagaccccatccctccacttgagaagaggagggggaagagtggggaggtcttcatcttccatcttggataccagctcagccacagcaggataggtcaccagccagagttgtgaggcttccccatgccgcattccaggccctaactcccaacccccaatgacatttctagacacatcctgggttacaaggaacccactgctttgaaggaaaggacccagtcctgccagcattcatcgcctgccaactgaagaccccttggaccctgaataaccagcagctatacccaggtactacgtcaagggccttgatgagccactgagacttgctggcttcaggggagactcagcacattcccagctgtggtgggccacaggccaagtctccttcagcttgagaaaagcagagggaaaagtaaaggggacttcgtctctcaccttaggtactagcacagccacagcagggtagagtacccagcgggctattagtgtccctaattctgggacttgattcttgaatggcatttctggacctgtcctgggtcagagggagggaagcccactgccctgaagggtgagtcccaggccaggcagcattcaccaccaactgagtcgagagacctggggccttacaggaacatcagcaatagtctggcagtagtccttgtggcctgggatggtggtagctacagggtgaggctcctctgcttttggaaagcggacagaagagtgggaaggactgcatcttgtggtttgagtgtcagctcagccacagtacaacagaacaccaggtagacgtctaaggctttgactctagtccctgacttcaagatgacacctctggatccacctggagcctgggggacctcatcaccctgaagggaaggacacaggcctggctggctttgtcacttgctgactgttaagccccaggttcttgagcaaacataggcagtagccaggatgtggttacagtaggccttgggtgagactcagtgctgtgctggcttcaggtctgacccagtgcggtcacagtggtggtggccacaggggtggttgtgtcactccaccctcaactttaggtgactcagaagagaaactctgcttgggagaaagtaagggaagagaacaggagtctctgcctggtaatccagagaattctcccggatcttgctcaagaccatgaaggcagtaccttcgagtcttcaaacattcaaaaaaactgagataatatcaagcatcttctctgaccgcaatagaataaaactagaaatcaataacaagaggaattttggaaactatgcaaatacatggaaatcaaacaatatgcgcctaaatgaccagagagttaatgaagaaattaagaagaaaattgaacaatttcttgaaacaaatcataatggaaatacaatatagcaaaacctatgggatacagtaaaagcagtactcaaaggaaagtttatagctataagtgcctacatcaaaaagaggaagaactccacataaataatctaacaatgcatcttaaagaactagaaaagcaagagcaaaccaaacccaaaattagaagaaaataaataataaagatcagtgcagacataaataaaactgaaatgaaaatacaaaacatcaatgaaacaaaaggttgttttttaaaaagttacacaaaattgacattgccaaactaaaaaaaagaaaaaaaaagatacgaataaataaaatcaaaaatgaaaaacgagacattacaactgatattgcagaaattcaaagaatttgattcctagtatcattgttggatagtataggcaactatataccaataaatcagaaaatacagaagaaatggacaaatttctagatatatacaaccaatcaagatttaatcaggaagaaatctaaaacctgaatggaccaataacaagtaacaatatcaaagctataataaaaaatctccaagtaaagaaaagctcgggactgatggcgtcactgctgagttttaccaatcctcctcaaactattccaaaaaatagcagaggagggaatacttccaaactcattctacaagaccagtattaccctgatatcaaaatcagacaaagacgcatcaaaaaaaagaaaagaaaagaaaaaaaagaaagaaaactacaggccaatatctctgatgaatacttattgaaaaattctcaacattaccaaaccaaattcgctaatatattagatcattcatcataacaaaatgtaatgtatccccatgatgcaaggatggttcaacatacacaaatcaatgtgacatatcatatcaacagaatgaaggataaaaaccatatgatcatttcaattgatgctgaaaaggcatttcataaaattcaacatcccttcatgataaaaactctcaaaaagctgggtatagaaggaacatacctcaacataataaaagccatatacagcagacccatagctcttatcatactgaatgtggagaactgaaagtctttcctctaagattcggaacacaaggatgcccactttcaccagtgttattcaccacagtactataagtcctagctacagcaatcagacaagagaaggatataaagggcatccaagttggaatggaagatgtcaaattaccttgtttgcaagtgatatgatcttatatttgaaaaaaacctaaagactccacccaaaaactactagaagtgataaattcagtcaagtcgcagaatacaaaatcaatatataaaaatcagtagcatttttatatgccaacagtgaacaatctgaaaaaaatttaagtaaccccatttaaaatagttacacataaaattaaatacctaggaactacccaaagaagtgaaagattataatgaaaactataaaacagtgatgaaagaaagagaacaccaaaaaaaggaaaaatattccatgttcatggaatggaagaagcaattttgttaaaatgtccatactatccaaagcaatctacagattcagtattatcataaggaaaaagaacaaaactggaagaatcacattatctgactttaattttttttatttatttatttttttgagacggagtcttgctctgttgcccaggctggagtgcagtggcccgatctcggctcactgcaagctccgcctcccgggttcgcaccatactcctgcctcagcctcccgagtagctgggactacaggcacccgccaccgcgcccggctaattttttgtatttttagtagagatggggtttcaccgtgttagtcaggatggtctcgatctcctgacctcgtgattatattacagagctatagtaaccaaacttcagggactggcataaaaacagacacataaaccaatgataaaaaatagagaaccaaaaaacaaatccccacacataagcgaactcattttccacaaaggtgccaagaacatacactgggaaaaagacagcttcttcaataactggtgctgggaaaactggttatctatatgcagaagaaggaaactagactcctatctctcactatacacacaaatcaaatccaaatgaagacttaaatctaaaaccttaaattatatataaaaaaaaaacccttaaactacaaaactactacaagaaaacattagggttttccctagaacattggtctgggcaaaaacttcttgtgttataccctacaagcacaggcaaccaaggcagaaatggacagatgggatcacatcaagttaaaaagcttctgcatagcaaaggacacaatcaacaaagtgaagagacaacccatggaatgggagaaaatatttgcaaactacccatctgacaagaaattaataaccagaatatacacggggctgcaaacaactctataggaaaaaatctaataataaaaaaatgggcaaaagatttgaatagccatttctcaaaagaagacatacaaatggcaaacaggcatatgaaaaggtgctcaacgtcattgttcaccagagcaatgcaaatcaaaactacaatgagatatcatctcaccccagttaaaatgtcttatatccaaaacacaggcgataacaaatgctggcgaagatgttaagaaaagggaaccaggccaggcacagtgcctcatgcctgtaatcccagcactttgggaggccaaggcgggtggatccctggaggttggaagttcgagaccagcctgaccaacatggagaaaccccgtctctactaaaaatacaaaattagctgggcatggtggcacatgcctgtaatcccagctactcgggaggctgaggcaggagaatcgcttgaacctggaaggcggaggttgtggtgagcagagatcgcgccattgcactacagcctgggcaacaggaaggaaattccatctcaaaaaaaaaagaaaaaagaaaaagaaaagggaaccatcctacactgttggtgagaatgtaaattagtaaaataattatggagaacagtttggaagttcctcaaaaaactaaaaatggagctaccatatcatccagcaataccactcctgggtatatatccaaaataaggaaaataagtatactgaaaagatacctgcactcctacgtttatttgcagcactgtttacaatagctgggatctggcagcaatctaagtgtccatcaacagacgaacggataaagaaaatgtaggacttctacacaatggaatactattcagccataaaaaagaatgaatcatttgcaacaacatggatgaaactggagatcattatgttaagtgaaataagccaggcacagaaacacaaacattgcatgttttcacttatttgtaggatctaataatcaaaacaattgagcttatggagagagaggatagaaggatggttactacaggctaaaagggtagttgggggatgaggggaaggtagggatggttaattagaaagaatgaatagaacctattagttgacagtataacagagtgactatagtcaataataacataattgtacattttaaaagaacgaaaagagtctaattggattgtttataacacaaaggataagcatttgaaggaaggatacaccattctccatgatgtgattatttcacattgcatgcctgtatcaaaacatctcatgtaacccataaatatataaacctactatgtacccacaaaaattaaaaataaaaaaataaaaaaatagaaatgatcaaacacctagaatacagtcaagaggtcaagcaggatgagatcagagaagtgtcaactggatttgagaacatggaagtccttgataatcttgagcacaattttcatggtgaagtcagagtagaagtgttactgggatgccaagaagtacagactgtctgtctgtgactatatataactctttcaaaaagttctgtgtgaaaagaaaggagcactaaaaatgaagccagccatcttttaattcttatggattgggctgtcagtctcttcaccctctagagtctattttttttttttttaatgaatctaagcatgcctttactcaattcaaaaaaaacctctgccagctctttgcggccctcaaaatgaagtcctaaacgtgataatataacatggattcataatttaactccaattacctcccttgcctgagagcccttgtgggtaaactgtcaatttcacaagctctttctaacctccatgtaacatgttggtcagcctgctggaagtgtcttccttctccacctggtaagcctgtatttacaacccatgactcagctcagacatcctcctcaccagtaccatgccaggcacttacacatcattcacatctacacctccccagtctttattcctttaagccagaaacatgagtatcagccttgacttccacatccactcatgtctcatcccccataactgttcgacaaccaaggcccagctattctactttctcaataagcctccatccccactctagacccctccatatccccactctagacccctccatatcgccactctagacccctccatatcccccactctagacccctccatatccccactctagacccctccatatccccactctatacccctacatatccccactctagatccctccatatcccccactctagtgctctccgtatcctgaatctagacccctccatatccccactctagacccctccatatccccactctatacccctacatatccccactctagatccctccatatcccccactctagtgctctccgtatcctgactctagacccctccatatccgccactctagatctctccatatccccactctagacccctccatatccccacctccctattccatctccctccacttgttttccacacagcagccagaacgaaccttttaaaacacaaagcaagtcatattgaccccagaataaaaatccctccatggcttttcatgctcttacaaaatgattcactgggagacaaagccctgcaccgtctgagccctgccaacctctctaccctggctgagagtccacaggactctcccagcactgtgttctggccacattgaccttgcagctcctcaaagccactgagttcctgaaccggttcccccatctctgccacccctttcacctgccattcctttcaccttttacacccaaatttgaatgtcatttcctcaggaaataagcacagaacagcaacctgacccagtcttaggacactctgcaattcttcacggtgctcacggccgcttccaattgcatctgcatccttatgtgactattctataaagcttcacctcccacctttagactggcagctccccgacaagggtgttggttttgtgcaccagtcataccccaccctcagctgagaacccagcactccacacttattgaatcaatgggcaaatgaaaaccctcataatttgaccttctctaggcaccgaccagaatctgagtcctcaacatggagagtaaatgtaaccaggctcctcttccttaacaggaactcttaccagttccaggtacttgtctttctaccaacttctatacccatagagattggcatcctctctaatttcctaaactcatcagttatcccttcaccttcaaatgcttcaactgacagactattttaaagcaagagaaacataacagagtcattttggtcctggacagaaaccagttctttagatttatattgcttggcttaatactgaatacccagggttaaatgttcttgcatgcaattagagattgtccataagatgtcggaagcggcatctgaggcactctgcttctttatcgagtatttaaactaagcttggcaaaaccaggttaactgacaaatggtatagaaacaggaaagtactttcaaaactacaaaacaccaagcaacattattaacattatgatcgttgcattagccagtcttccacttactagaggaatataagtccatttttacatggctaaaagtagacttctttagtgaatgtacttacatatagaaaatccaaaagaactatctgtatcagacactatctgatagaagatttatctgaaaaaaattttaaatcatacctattaatatgaatccaggtgtgggctttctttctcatgtaagggacaaagggtctgtttgtacaggtggaaataactgccaaataggctgaatggcaggaacacaaaccctagggatccaggaagcagcctcagaaaacaccttctctgaccagatacctccttgaagaaaatgtgtattagtttaatcagtgcatacatcatcatcatggtacacaaacttctttgctttccttcctttcctctttctgtccttttagactcaaatataccaaccataagccttagcatccataacttttaagtcagtttctaaatatacacaaaccaaattaagaatcccctaccttttgttaacatttggggataccaggtaaaagacaaacaggaatgctttgtactgtactatttttgttaacttttctgtgagtttgaaattatcccaaatgatttaaaacttttttttaatttaaaaagattatcctatcattgaatattttaaaatattgccatgaccaagtttacagtttgaattttaaagctgggtctaacacagaccagaattacttcaattcatccaaaatttctggccacaaagttatttttatcaacttaccttcctagctgacatgctcagttacaagttacaagtgctgtctccagaatcatcaaacaccacccagctccttcaggggcaactgatgttccttcagctcgaggagctctttcacacactccaaggtgaaagtactcgctcaagattcacagaggtatggctcagcaagctgcaccactgccttcaaggctgaaatgtccacatctgtggcctaaaatgtaaaataatgtgacttaacacgtggaaatcaaaattaagctccacgtataaaacactactgacagcctgatttttttaaagcatgcaataggggcagggatgcttcttccattatggaagcctatccttccataaaggataaacatgagaggcctggcttttagctcatggaacttacattgtaatcaagggggtaaataaacaagatagtgatgagtaggtgacagagagtaactagcaggggtggtgatctggttttgctgggatggccaggcgaagtcacctctgcgctgagaatgaaaaggaagcagccatccaaagagcagggaagacgcaaaaggcctgtggtcgagaggggcttggccactgaaagagcagaaaggcagtccttcttgctagagccaaagggaggaaactgggagcaggggagaaacagtaagtgatgaggtaggagagaaaggcaaaaagaccaggacatatagagcatctggcgcttggattttacatgttctccagcaccatgagaagccataaagccaacacgggaccctcggtaaatgcaatgcattagtagttttaagcagagaaattgtacacttctcttttaaaacaatgactttgactgcttttagagaagtgatgggggcaggaggggtgggcactatcataacccaatgaaaaggccagaacttcaactgaagatatcagcataatccaaaacttaaaaactcacaaggaacagctgcaacccactgcctcgttcataatcactgcagtatgcaatgccattttctaaaggagctgcagcaacaacttgtatacacaccccctggtttaacattttagcttaacaggactttttgtggttcagttaacaaacactgagaaaaattcacagctgtaattggagtgcaaatttaatgtaaaaggcccagtcagttgaaaaataagattgtttttactttctgcaatgagacacattatcaaaagattaaccacatatctacaaatttactaggcaaaaatgggatagttttaaaatgcctctttggtttgagttacttaatgggctacaactaagaaggtaaaaaattaatggaaactgttgacttcataattaggcctcctcattttttaaatgatctcaaatacttcctccacttcataggtttataatccagttccccttgtcaaaggacgctgaaacttaagccactttaattccctggtagctcctcctcagctgcctttaaaatttgcggaacacttcctacaccatagcaattagatgtgaaaaacatgctatttcaatcagctcataaactttaattaaaaataagcactttggctctaagagtctgaagtaaagtgcttatagcttgagacaaatgtcttaacaacaaaattaactttacctcaagcagcaccttgagcacatcatgtgccagactgtccgccatccagatggctcaaggaccttctccaagaactcagctgtgaattcccgtgcctcagaggccttgcagtcaactacaaacaaattaaacacaggaagaagtgagaatgcataaagcagagggaagttaataaatccacttaaatccattttctcagaaccaacaactggcaatctgagggactgagataggcagtctgcttataaactaaaaagataaaaggagcaaaaaaggacaggcacggtggctcacgtgtgtaatcccagcactttgggaggccgaggtgggcagatcactagagctcaggagttcaagaccagcctgggcaacacggcaaaaccctctctttagaaaaaatacaaaaattagccaggtgtagtggtgcatgcctgtagtcccagctgctcaagaggctgaggtgggaggatggcttgagccaagaagcagaggtcgcagtgagccaagatcgtgccactgccctccagcctcggtgacaaagcaagactctatcaccaaaaaaaaaaaaaaaaaaaaaaaaaagcagaaaagaaacaaaaaagagaacctactcacctaaaatgtagtcttgataggccctggattactcacagagtaaaagttgatttgtttgcaaaatttctaggtgaagtggcttttttccttctggaataaaactttgtaaactacaacctggctcatcaagacagttacaatcactgcgtgaatcttcattttgaaagaaacctaaaaaaacaaaaacgataagcaggcacaagtatcccagatacttccagtgctcgtagagtgcttctgtcttcacatccttgcttgaaattccaaaccaacaaggatttgagtatgaatgctctatttatctctattattgtcagaagaaacagctttacgaacttaaaaaatatctgaaaatccaagttctacttaaaaacagtaagagcttaagatctttcacaagttaggtttttgttgttatgtggggatttggaggaaagcagagaaataaggttgttttttaatccagtggaaaccacctaagttcttctccctagaagtaactatctttactatagttagtaagttataacagtcaagtatctgttatttttttttctcccaaacacttccacaaagcagcattaaaagagagagctgatttcctatactccctctccaacgggctgaagcctctctttattttctacaatatcagtctgccaatggctcctcaataaacagggatgagagattcttaataatgcataaggtttacttcactaagactactaggttcctcctcattaatttcaatgactgtgtctaaggaaaagatcagaaaatgcaaatcacattaggtttgggctgtatgtaattatgtttcataaggcatgattcagccagtggcgtatctaattctgtgtaataagatgtttttaaaaaacgaaatgacggctgggaacggtggctcacgcctgtaatcccagcactttgggaggccgaggcgggcggatcatgaggtcaggagatcgagaccatcctggctaacacggtgaaaccccgcctctactaaaaatacaaaaaattagctgggcgtggtggcgggcgcctgtagtcccagctacttgagaggctgaggcaggagaatggcgtgaacctgggagacggagcttgcaatgagccaagatcatgccactgcactccagcctgggcgacagagcgagactctgtctcaaaaaaaaaaaaacaaaaaccgaaatgaccactaaataagcaatgctgagggtagcacttagactggcagagtagtttccgaaggtggtttcaaggaaggtgtctgagacggtaattagcagcagtctttcttcctccaccacctttgattttctcctttccctttctccttccttccattcctttgtcccagctcaggcccccagaattacttgatcccacacatgagacgatcaaagcaggcaagggtctactactgttcacaaacactgacacgcatgagccttagagggcatcaacaccttactggctgtgtgacaatctctctgtgcctcagttttcttgcctataaagagaagataaaaatagtatgcttacttcaattaaattaagagaattaaagaaattacttgttaaccatttactacagtgccaattacacagtatatatgtatatttgttaaatataccttacttcggcaccactctttacagctattttgtttttccagctttactgaagtaaataaaaatattgtataatctaaggggtacaatgtgatgttttgatatacattatgaaatgattgccaccataaagcaaattaacatttccatcacctcgcatttgtgcgctgagaacacgtctcactctcggcaaatttcaagtacacagtagtgtcattaactacagttaccaagctgcacactagatccccagaacttactcaactttgtactctttgacccacatcttccccatttctcccacttgcagcccctagcaaccactacgctgctctttttctctcagttctgctttattttccacataggtgatattatttagaatttttctttatttacagccactttaaaaatattccccttcgcacagtgtttcactgcgtcttcaccacaaggacagccactggctccgtctttagatgggaaaactgcggcccggcgacttttgctagttggaaaggtgggtcagtggtggaattaagtcacacttaggccttttcacttcgcagcggctctttccactacacgatacaactgaacgtgttaaagtaaaaacgtgacccagtttaaaatgtcgggggcgggggaacggaagcggggggaaggaatctacctgaggagtgaggaggcagaaaggaccgagaacaaggggacccggttccatttctggaccccgtccgcaggctgctcgcccgacttggggtcgctctgccccggacgatcaggacagctgcgtgggcccagggttccagctgcctttatcttcgggagagcgaatggctcagatctccgcggagatggagctggaaaagcggagccctcgctccacggctcgcggcagttccttgaagcccacccaggtggggagcccctggcgcagcccaactctctgcagtctcggggaagctgaggcagagagggaagccccgccccgggtccttcccgaccccgacgtcctggcccgccgagtcccaaggccccggcccgggcgccccccgaggggccggacgcccaggcctcactagggagcggctcctggcccggcccggcgggcgctcacctttctcccgggcactggagcctccctggccgcccaggtgcacgcgaccccgagactccgtctcccggccacccagtcaggcacttcaaattcccgcggacggcgcggcgcctctgattggacgggcggccgagctcgtaccggtgagagccccgccccgccgccccgccaagcgccccctcccggcaggcggaccgctgctctcgctcaagttctggcgtggggctgcgctggagcaactggggcgaagttgaactgggacatccttggagatgatttttgaaaaacgagcaagccatgcctggaaatgagggagagtgggaaagacactggattgagagtcagaagacatggtgtttagacggacttcggccattcctaggggcactgccttgggcaaatcatttcccctttcaggcgcacctcacctgtgccaggatgctggcacacacacagtgtattttcaaagaatgtcaaatgtagtatttgtttttattattgatcaaaggcagctgtagcttccaataataatggctaacatctaccgagtactgtgtgcgagacacccttctgcatgctttacctgaattaccttatttaatcttcaaaaaccatcccgtgagagaggaactattattatacccattttacagagaactaatagagacaacgagaagtgaagtgacttctccgatctaactaggcaaagccaggaggtgaaatcagccagactccagaagaaaccctttagtgcctctgtcaggccctcacttgccaggctgatgagagcaacctgagatggcccaggtcaccaggacaccaggcggggtgagtccacaggaggccaggagcctggacatgacacccagggcagccttctcgtagggaaatatttccacttaatgctttgacggaaaacctgggctacagtctctcagatcccctacagctgaaataaaacggagccaggagaggtgattgtggaaacctgcacttaattcagctagctttgccaggaaacaagatttctttgacttgtgtgcagagtctgaccttacatttatttgttcactgaacaaatatttattgagcaccataaggtgaaaacacaaaacaataaaattaggactaacaacgggccttgaggactaaggtagctttttcataattttcccgtttaaccctcccgcccataaacctcacaagtggcagcatttctccttacccattttcatcatcactttagacaacacagctctcttcttattcaattaccaaatatttcttcaaacatcaagatattactcaaaccagtgcttctagaaaattatttgaaagaaacaggaggcaacagggtcagacagaataccaatgctattgcaaactccataaaggagaaactattgattacatgggatacatttgctagacacagcccttctcatttccacaccggtgtcaccacatattccctacttgttcagattctatcagaggtttttagagtctctccctaagtggagacctgttagaagcacatatgtcttgtgagttttctttccctgcccctccatatcctaaagaaaggatttttcttcttcctccttttcaatctcttcccttgtagcctatcataaccttctactcgccctaaggtggacatcacctactgctattccatcttttttatatctttgctctttttatcactactgggtccttactgtgtttaaacatgggctcacaaatacctgcgctccccctaaaaccttcccaaagcccaacttcaaccctgagaaactgcccttttgcttcccttcttggtagccccagacttttcagtacagtgcctccctctcctgctttcttgaaggccagcagcccctcctgaggcccccaacttccaccccacagcactgacctggctgaccacccacctgtgctctttcctcccttgccctctgcgtcctctcccttgatctccagtctagttctctgactacagtacctgggtgaactgtggtctgaaaggattgaatgaaaaattccagaaataaatgataagtttcaaattgtgagctgttctgagtagcaagactcattcctttgtccacaagtgcccacactgtatacgctacccatctggtagtcactgtcaaggccgaaggaaaacttctcctttacccttgaaggtttgttgaaaatcaaccaacaaaaggcagattaataagagaaaaggcatacaaatgtattcacatgcacggggttggggatatcacacaggatgaccgcaccaggcagtggggtagaggtggttgtacacccttcttcttagggcaaagggaggtgaggaagtgtggatgattgaggggtatgaggggagaattccatgggcttaaagaacatacaatgacctgggacaaagtctgttgagcccacagagcagacaatggtttatgacaaaagtccgtccaggggtattgaaaaactcccgtctttcttcctgcaatatacattcagttaattaaaattcagggaagaaacccaaggtaattgtttccttctttggtgggtcagactttaggcagaaaaaggaacttcagagaacttcatctgtgctttgtgagagacagaggattggaagacaggatagtgaaggtcagagagaccttgaggctgcttcttcagctcaccatgacaaagcactgtggtttggggtatcagtttctgggccccaatatcactcagtggccatctcaattatcagatcaaaaaagcatagtatagtatatacagggtttggtgggtttggtactatttgtaatttcaggcattcactgggggtcttggaacagcacagtgggagtacagtagtgttcccaaggataagggggcactactgtactctttcttgcccttgtttttcttcctgtctctcagattctctaaacctaggtgattcccaggggcatatactacagaagtcctagtacaggttatggtgattcatgcaagaaagtagatttgctcatttatttgtcaaataataaatatatatatagaatagactgtgggccagacattgttctacattctagggtaacagggcaaataagacagccaacatcccagcctgcacatgatgaaaaagtaaaaaaaaaaaaaatcaattcacaagcaaatttcaattataaaaaatgcaaaaaataaaagaaattcaatgatgtgacagaaaatgaagggggaacaaattcagattttatgcaaaacacttgattttaaactgttagcaactaatttttaaaaaaattaaataccatgtaagccagaaaaacttcacttcctgggccaaattggcccatggcccaccagattgcaatttctgttccaagctccaactactgaaaatgtagtccagggaccaggagattgttagaaatacagagcccctccctccctccccaacccatcccccagagctgctggatcagaatctgtgttcaacaagttccacagtccccaagtgacatcattcacatttgatgcaaaggccttcagaactcatgtctttcctgaggctgtttaattttcatattcctgctggaaaacttgacctggggttcttacctgtggttcacctccacctccacaatgctgcaaagccacacctaagcacagcccatcctccagtttagatgtctctcaccatgtcccactccccaaccacggcctgtgtgggccgccaccatctcccctagggctgctggggcagcatctaggaagtcacactcaagcctccacctgccccagcccttcagaattgactgctctcctcttgctgctcctggtctaggggtctcaaacttaaatatcgaaagtctagaccaaagacacaaagcagagaagtgagtgctgctctttctccagtgggcaggagatgagccaatgttgccacgtgggccttccaagagaagccataaagctaaatgtagtgagacaatttccatattaaaatgttaacatctagtttttaaaaattcaaacagtatgcccaccaaataaaacctatctgcagaccaccagtttgagacatctaagacctagtctgcatggtgcattgtcacagaggctgtgcactctttgaaggcaagaaacgtgtcatgttccttattgcgttgctggcacctaccactaggacggatttagtaaagggaaaaactaaattaatactgtttgtatctgtgtgtgtgtctgtcctttttcttttaaattttagattcaagggcacagatgtgggattcttgcaaggacatattgcatgatgctaaggtttgggtttctattgatcctgacacccaaatagtgaacacagtacctgtatttttcagttttcgcactgctataaataaccacttgagactatgtaatttataaggaaaagaggtttaattgactcacagttctgcatgactggggaggcctcaggaaacttacaatcatggaggaaggcgaaggggaagcaagtcacatcttacatggtggcaggagagggagagagaaagaaggagaaggagaaagaaggaggaggaggaggaggaggtggagaaggaggaggaggaggaggcagcagcagcacatacttttaaacaaccagatcttgtgaggacacactatcatgagaacaggaaaagggaaatctgcccctatgatccaaccacctcccaccagttccctctcttgacacatggagattacaattccacatgagatttggatggggacacagagccaaaccatatcagtacccaataggtagtttttcaacccttgccctcctccttttcttccactttctggagtaaccagtgtctattgttctcatctttatgtccatgtaaacccaatgttttgctcccacttataagtgagaacatgcaatatatgcatttctatttctgcattagtttgcttaggataatggcctccagctgcatttatactgctgcaaaggggatgatttcattcttttttattgctgtgtaatattccatggtatatatgcagtacattttctttatccagtccactactgataggcacctaggttgattccatgtctttcctattgtgaacagtgctgcaatgaacatacgagtgcagttgtcttttaggtagaatgatttcttttcctttaggtatatacccaataataggactgctgggttgaatgattgttttatatttagtcctttgagaaatctctaaactgtttcccaaagtggccaaacattcctaccaacagtggataaatgttctctctctttttttttttttgcaaccatgtaggctgctttgggaagtatggctattttaatgatatccacttttccaatccatgagtatggaatgttttccatttgtttgtgtcatttatgctttctttcagcaatgttttgtaattctccttgcagagctctttcaccttcttggttagatatattactaggtatttttttgtgtgtggctattgtaaataagatttcagtctttacttggtaatcggcttgaacattattagtgtagagatatgttactgatgtttgtatgttgattttgtgtcctgaaactttactgaagtcatttattgggtctagagtctttgggcttttggtggagtctttgggcttttttaggtgcaggattatataatcagtaaagagagaaaacatgactacttcttttcctattttaatgccttttacttcttgctctttccttattgctctggctaggacatccagtactgtgttgaataaaagtggtgaaactgaatatccttgttgtgttccagttcctaggggaaatggcccagcttttggccattcaatatgatgttggctgttgctttatcatagatggctcttattattttgatgcacgttccttttatgactagttatttgagggtttttatcatgaacaaatgctggattttatcgaatgctttttctgcatctattagataattctatagtttttgtttttaattctgtttataagttgaatcacatttattaatttgcatacattaaactaactttgcattccagaagtaaagcccatctgatcatgtgtgaactaagtttctgatgtgctgctaaatttagtttgctagtattctgttggggacttttgaatgtatgttcatcagggatattggcctgtaattttatttttcggttgtgtctttgccagattttgatatcaggatgatactggtttcatggaatgttttaggaaagaatccctcctcttcaattttgtttgaatagtttcagtgggattggtactagctgttttttatgtgtctggtagaattcagctgtagtccagggctttttttggtgagtagttgtttttgtttgtttgttgttcttgtttgtttggtagtgagtttatttccatgtttagaacttcattaagcatctcttgtaggcctggtctggtggtgatagattccctcagctattgtttttctgggaaagactttacttctgctttatgaagcttagtttgtcagcatataaaattcttggctggcatttcttttctttaaggatgctaaatatgggcctcaatctattctggcttgcaaggtttttgctgagaagtctgctgttcatctgctgggtttcccctcatagttaacatgacccttttctttagctgactttaagatttttttctttcacactgaccttggatagtctgactacgcgccttggggataggtgtcttttatagttatcttgcaggagttctctggatttcttatatctgcaggttgacctctacagaaaagttggggaaacttccctgaattatattctcaaatatattctccaagctgcttactttctcttcttctctctcaagagtgccaatatgtcttagatttttattgctttacataatctcatgtttctcaaaagctttgttcattaaacattttttgtctttatttttgttggggttgattcaaagaaccaatctttgaactctgagattctttcatctgcttggtctatcctgttgctaaggttttcagtgtattttgaagttcctgtagtgaatttttaaaattttcaattccaaaagttctgtttatttcataacataattatgttgtctttcaaatcctgaatcacttttctgtttcctttgtgttggatttcaactttctcttagatcttgttgagtttctttgccactcacactctgaattatatttctgtcatttcagacatttctttttggttagaatccacttcttgggagctagtaagatactttggaggtgacaaaacactctggctttttgtattactggagttattgtgctgatttcttctcatctgagaaagttgacactttatttttcaaatgtgctaccatttggatggggcattttgatttcttattgttttttcctttgagaatttgactgtggtttatgttgtgtatgatcaattggctttatgtctgagagctatcagagggcctgggttccttggttgcagacagattcatatggtggctttctaggaaactgcttggtgtagcaatgtgttttcatttggtgctataattcagactgcagtcaagtcgatggcacttcagggcaagagccagcaggagggtctcactttgcctgtgctcaccctcagcaggggtggaggcaatagagacatacgagagcaccctcccccagcactgctgttcttcagcagaagtagaggcccttgagaagctcgagaagtgcctctttcagcccacgcttcccgggacccaacaggaagatctatggctgcatccacagcaaggcactgaggagaaacaggggcaattagacgacctcctctccaagtttgtttgtaggctttggtgttaccccctccagtggttggcactgcgcttccatttcctttgacccaagggaagctttgacaggctgtgttcttacttcccttaaaggctgtcctcaccaagggttaggtctccagcgcaggtgtgcggggcaggtaagggggagggtgcctcccttccactcctcaaagttggtgggtcacactttgccagctgatcaagggagcaaactggggcacccagcaaggatacacactgactggttccagatcataaagctgtccttggctgcaagtcctcctgctaaggagaaacctcttcttcagcacttctcctgcggcagccccctgtaacaagagagtctaatttaactgcctgctcctggagtggtatccacactcaccactcaattctggctgtgggggcccttcccctgctccagggcaaatggtctactctctggcctgagactaaaatgtctgcagaagacattattgccaggttgccacacaatgactgccttggtatgagcccagattaaaaatagtatcatcctctcggtcccaagtctgggaaaatgccagcagcttttcccagtgtcttccctccctccatctctcagcctcccccaagctagctccggggcttgagaaaaaaggggtgctctgtcttggcctgggttgcacagacccctagcagaaggatgagacacagagggagacaggctgccacccttgcagacaagggctttactcactggtcagccaaatgctgtcatggaagctgcttgtgcgtctttccctccccagagtctggtgtgtccttcactagtctggtgaattcctgtcttccttcttgagtgaaaattcacagagttgatctttaagcactatttttctatttccctgtggctgtggcatgcggaaagcctctcatctgccatcttcatcattaccggattctctaatttactgcttgttttcccttccttccttccttcctttgcattctcttttcatcaccaacatggtctctaacccctagtggacctttcagatagtggtttgcctatggttctttttatatataacaatacaatgtcattagccgaataacttgggtttagagtctagcagccagggctggggccatgctggctgcttctgcccagatgcttccaggaagcagattcaacattgacatcattacccgagtcagggtcagtgaaggctgattgtattggtgaccctcttccgcctgcaaatatctcaacagcttccctaagaacaggaacagcctttcgggtggtaactaacagcgtggctaagggctttgattccctaggagacaagtactactgtaagtcattattggacattcatgtgaatcaatttcagagagcaaatatggaccagacagacagcacatattctgaacagcagagaaagggaaagagggcccctgattgtaggaggggtcccattggggtaaggcttgtctctctatctgcagctgtatagagctccacatgggcccagggtgggcctgagcaccttccataagaaagaaaggtagcccacaactcccatcggcttcagggagagaagagatactagctcactgctactgatttgagtatctagggcttcccataatgaaaacgaaaccaaagaaaagccaggcccaaatcttggcatgtattttccactagagggcagcttaaactttcaaaataaaataaatcttgcacactttgtaaagtactatatataaaatttgtatgtacacatcatgtaaaactaatgttcatattctagtctttgcaagcctgtacaagcaggtcaagtgttcaattccatatgtctgaatgtatgtatcctaggaaactagtctaggatacaactgaaaaattctgaagaaagttaagaagagaagtgccaatgcccagtgatctgccctctcagtccaagtcctgccctgcacgacccagtgtttatgtttttatcaggcctatggagagaacacaggtcagtgtgtctgcttctagctatgatgaggaactgaagttaaatttaccttcccactataaggaactagaaaaccagacaaaatatatgaaacaacagtttttaaacaatgatcacggcagggctgtgatccctaagagaagacaaacaaaagttgtgagtactgtaatccccctggctttctgcctgcaggcgcctctggactgcagaactggaagggggagtttcaacagagcacagcatctcaccgagttagggaaagagagatcagtttggagagacagtagtggctggaatttttaaaaagaagaaccaagagaaagagctgatttcaaaaagagcttgagaaatgtttagaaggttgccactctagtctgattctgaatactgagccacatgttactagggtgaaactgcatgggctgagccaagagttaaacgatgaccacaactcacacagggatgggagacatggagttcagacaagccagagcggtgacccctcaaagacaactatctaaagtatataaagcactcacagaactctgaaaacaacaaacaatgaaagacaaataggcaaaaaacataaatagacatttcactgaagaggatataaggatgccaaataagtacatgaaaaatgttcaacttcattaacataagggaaatgacaaatgaaacctgatggctcacgcctgtaatcccagcactttgggaggctgaggctgctgaatcacctgaggtcaggagtacaagaccagcctggccaacaagggggaaaccccatctctaataaaaatacgaaaaaattagccgcgcattgtggtgcacgcctgtaatcccagctactcaggaggctcaggcaggagaatcacttgaacccgggaggcggaggttgcagtgagcggagatcgcaccactgcactccagccttgatgacacagcgagattctatctcaaacaaataaataactaaaaccataatgaggtattactacacacatatcagaatgattagaataaaaattagcagaagtagcataatgctgcgatacagagaaactggattactcaaacattgctggtgaaatgtaaaatggtacaaacactctggaaaatagtttggtgctttctaaaaaaaatgaaacatgtaagtaccataagacacataactgtattcctgggcatttatccctgagaaatgaaaattgtgtttatacaatcacctgtacactaatgtttatagcaacattagtcataatagccctaaactggaaacaacccagacgtccttcaataggtgaactgtcagacaaattgtgatgccttcaagccatgtgtataaattagacttctccagagaaagagaattaatataagattatgttggtgggactgtaaactagttcaaccattgtggaagtcagtgtggcgattcctcagggatctagaactagaaacaccatttgacccagccatccctttactgggtatatacccaaaggactataaatcatgctgctataaagacacatgcacacgtatgtttattgcggcactattcacaatagcaaagacttggaaccaacccaaatgtccaacaatgatagactggattaagaaaatgtggcacatatacaccatggaatactatgcagccataaaacatgatgagttcatgtccttcgtagggacatagatgaaattggaaatcatcactctcagtaaactatcgcaagaacaaaaactgaacaccacatattctcactcataggtgggaattgaacaatgagaacacatggacacaggaaggggaacatcacactctggggactgttgtggggtggggggaggtgggagggatagctttaggagatatacctaatgctaaatgacgagttaatgggtgcagcacaacagcatggcacatgtatacatatgtaactaacctgcacattgtgcacatgtaccctaaaacttaaagtataataataataaaattttaaaaaaagattatatatagagggggtggggggagagagagagagagaagggggaaatttttagaaattggctcacacaattgtaggagctggcatttttaaactttgtagaccaaacaggcagactgaaaactcaggtaggagtggatgctgaagtcttgaggcaaaatttctttttctttggaaaactagtcttttctattaaggccttcaactatttatatgaggcccatgacattattgagagtaatatcttttacttaaaatcaactcattatagatgttaaccatgtctacaaaataccttcacagcaacacctatattagtgtttaattaaataactgggtactatggcttaatcatattgacacttaaaactgaccatcacaccatattcagcaattaagaagagcaaactattgctatacataagaaactgggcgactctccagtgaattttgctgagcaaaaaagccatttctaaaaggttacatactgtataattccatttatataacatttttgaaatgacaaaattttagaaatagaagagtaattagtggtagccagagtgggaggaagaggtgggagtagataagaagaaaaagaaggagggtgtgtttatgaaattacaacataagggatcctcgtgatactggaactgaccagtatctgaactgtggtgttgaagacatgaacttatacagattctaaaataatataatacttaatccacacacacaatgagcacagcaaaattagggaaattggattaaggtcagtagattatatcaatgtcaatatcctggtataatagatactatattatactatattatagtgtataatgagcataattttcatttctcagggataaatgcccaggagaacagttgtgggtcacatggtagttacaggttttatttgttaagaaagtgacaaactacttttcagtgtagttgtaccattttacacttccagcagcaatgttggagtgatccagtttctctgtatccttggcagcataacactatgccacaacatagtatctgctatactgtattatagtatattatatatatactatagtatagtatatattaatgtatactatattatactatagttttcaaatgttacaactggaggaaacaatgcaaagtgagcggaaatctctattattttttaacatcaactttattcttataatttacataaataaaatgcagtcactttaagtgtacactttaaaagtttcaacaaacatatacaattgtacaatcatcaccacaacaaagatataaaatattttcatcatcccaaaagagtcccttgtgtcacttcccagtcaaccgccttctcctaaaacccctgtttccagcccctggtaaacattgatctgctatcattataaatttgtctttactaggtttcatatatgtagaatcatggagtgtgcatactgtataattccaactacatgtcattctggaaaaggcaaaactatggagacagtaaaaagatcagtggttgctgagagttacgggcagagagtgggatgaataggcagagtagagaggatttttagagtagtgaaattttttgtatgatgctataatactggatacatataattacagtatacctttgtcaaaacctatagaatgtacaacatcaagaccgaaccctaatataaattataaactttaggtgataatgatgtggcaatgtagactcagttgtaacaaacgtaccactccggcagacaatgttgataatgagggaggctgcggaggatgtattaatacaagggaactatctgtactctccacttaaatttgctctaaaaaaaagtatttttaaaaagaaaaagtaagaaaagctcagagcctaccagactcataaatgttagtgttcttcagggatggcctcacttcttttatgtctctgttcttaaaaaaactagataattttatccagtcaacccagcaatgtccttgttgggtatatgcccagagcaacatacactgttctaccagaatgcatgcccacaccagcattcaccatagcagagacagggaatcaaccaaggtgcccattaatagtggactggataaagaaaatatggtaaatatataccatgcaatactacacaccatagaaaataatgaaattatatcctttgccactggaggccattatccttagtgaaacagtgtagaaagagaaaaccaaataccacatgttttcacatataagtgggatctgaacattgagtacacatggacataaagatgggaacaacagacgctggttgctacaagaggagagagggttagatggggggcaaagttttaaaaactacctatcaggtgctatgctcactaactaggtgatggtattattcataccccaaacctcagtgacatgcaatttacccacgtaacaaacctgcacacgtatcccctgaacctaaaataaaagttgaagaaaaaaagaagccaaaaagtgtgttattattgaataaaagaagaattttgaaatgacttatagcactctttccaagttttggtcccctgtgttagaccttaaggtatcaatacgctcttaatattataagaagttttgatttttaactcagagaagttcaacttttgttgtgtcttgctgctttcagctttctatcctcttgagaaggcctgagaggataactttctctttgtaactttttcatcagtgtttgtaacttttttccccctataactctaaatgctgttgaggcctgatgcaaaaatattttatcttaaaggtctcaaaggcagtggtttcctccagtataacttgattctgcactcttgttttttcttaatatatctaaattgtttcatgaacaggaaaacttaactcatgactgggagtaatttgagtattctttccatcaggtttgaattccaggtgatctgaataggcttctcataagtggaagccatcactgcagagggtcttccttcgactttggtaactggcctaagaaacagatcttatgttttattgagataattcctacgtcatcattattaaattttttatttgcttaggaaaactgagatttaaagaaaaattaaggcttttacacctatataacattctgtattgattttaaaatccttgtgctgttaagttacaggactttgactcctgggtcttgaaaaggcaccaattcctgttaaatcttgaacatttaaaatgcatttgtgagacacagggccagaaattaaacttattcaatctctctcagcccagggactactatgaaagaggtgggcatgtaagattataggggcttattttgagagacaaaattagttcagagtttctctgtaaattaaacatttttatcaaaagcacattgatgcaaggtcagcatataggtccctgtgttggaatagcaaggtttccttgaggcattaatctgctccttaacttaaaaaaaaaaaaaaaaaaaaaagcttataaaagatttatggaaattatatcttatcaagctgactaaaattagatttgttcataaggcttatttatattagcttaaatattagtaatacattatatgaaggtaaattttaatttttagttttctcttttgaacaaaacgtttgtgtaatattaagaaatagtaaaatgtttttgtttgccctttgagtaaactacaaaaaaaaaaaaaaaagaaaaaaaaaaacaagaagggggagagagagagacagacccagctggcctcatggtgtctttattagaccttattatttgggaacctgagtctcttctatgttaagagtaaaagtttctgcctttttgaaatttttgagttatcactttggctaactgaataacttattttcagtaacatataatgccattttgcaattttaagtgttttaaacctttgttatttgacaaatgctccaaaatcaaattctaaattcagtcttttggccttaaactaactttttagaagtccagcaaagacatatttgtcttatttggtataataaaatcatacaggaagcattgtcaaatatacgaaggtgtttaactttctttgggttatatttatataaatgtcttattagtatgtgcttcaaaatcgtatgattcctacagttctaatatgtttgagtatatgttatcagtaataattataattattatgttaaattgttgtatgttacaaaataatcaaatttccttgtcaattgtatctctaacaatgacagttctaagattttgccatccacaaatattgtattactttaatccttttcaaaaagtagtttttaacttcagtgagtgctcttaaacacaggtttctgataattttggagactgtgttgttggaatagaaaaatataacttccaggactctaattaaaaagttaatgtgttcatgagaattgtcaacacaatatcaactggaatgagttaattgggcttgatggtttgaaaaaatctaacctgagatttattgtattaaaatgttccagtaaagccaattttaaaaagaagcctatatggaggatagtttttcttgctggaatttatgcaaataatcaggccaagtataataaaactaaaacattttttttttcaaataaattagtcctgctatgagttgtctttggtaaaaatggagaactgaaagagacaaattatctttcaaaagaaactatagtatatgtgttattacattctagtcttgttcactgttttttcagtttttattattttctacaatttggaccaaatcctaaagttttcctggctacaagttttccaaactaatgtttttaattttttcctttcttttttttcctctaatttgtctaatttgaaatcaccagaaattaaagctgtgtttttctcaaagcactgtgaactgaagctaaacaacttaggaagaaataacaacctatttatatgtcctaaatcagttttccaggattcttttccctttttgttgttatgatctttcctccctcctttttttccccattttatttctctgttcttctcaatggaatgtgagaattcacaacctgaatgagccttcctaacaatgtggacttatccatctaggaatgaactatcctagtggtgagagatcagacaaaacccaataccacagattcattttcatctaaaatactttctttgaaagatccttttaaatagggggaaagtgataaagaaaaactagaatgttggaaccccaaattaattatgccaaaagggaaaagttagagcctagaagctgagttattaaaaacaaaacaaaacaaaaaactgcctttccttttgttcctaaaccgattgctacagatagaatgccacatgtctccacaaagggcctccctcatcctgacaatgtaaattaacagcttatcttcatggacacaaaacaagaggagactggaaaccgtcccaccacccaccccaagacaaatgcatacttgactgcttcctctactcaatgtttactttatcttatgtaaagtgcacatttaccgaacacgagatgaatgcataattgacttttccctctacgtccgccttttcacgtgcaacaggtggattcagttaacctaacagaagcctcacaagaatgtgaccatatccttctcttttctttctttccctttttcccttctgccacatttaccctttaaatattgaagccatcaaaaccttcctcagaaaaagcacaggccccagatcctgttgtagcttatgtctgtttttcccaggtacatcgtcagccttgacaaaatacatctctaaaatgataaagactcgcctcattttttctgatacatatgaaaagagggtctatatttacattaatctctgagtgttcttggcctcattgaagacccacttccaaaaattagacaccttctcagaaattgggaggaatataattttttgcttcaattctcaccaaactgcccagaaacctcctgacatcttggaatgtcttttaagaatcccaggtatcccagtaaccattttcacatacaatacagctggactggctggttcatgatgtaaatagacctgttctgtcacccctactccatcactgctgtcacacagacattcctcctcccattctaaggaaaggtctttataatgtgacaacaccttcctcaggaagtctcccagtccttatttctgagtgagcctcatatttcattatttttggaggatattcctgaccagctggggtgatggtaccctaggagaaggtatcattccatactagtcttgagctcagaagcagatccgggaggaattgtcccttaagcactaagggtttctactcttctcaacccatattcattccttagtttatcccacccagtctcgtggctttaaactccatctacatttttcacttttgaaagcatgctctgtggaccagtagcagcatctgggagctggctggaagtgcagctttccagaccctgccctcgtcctacaaaatcagaatttgcattttaacaaatccccagatgacttaccagcatgtggtggtgcgttgccctatgcctggtacctcccaagttatctcctgtcctgatatctgccccagccactctgcagctgcttacatcacagttcagcttgaaggtccaccagacatattaaacatatccaaaatcagattcttagtttctgctccctaaccctgccccaccccctgccttccccattccagcaattacccttatccagttgttcagaacagcaatcttgtcattatccctgaagacttccctcatacgctatccaatcccccagaaactgcttccatccacttattaccacttgccctgctgcctgtccaaggcaacatggcgtctgacataaagtgatacaatttcctccatcttgctacttccagtcttaccaccacagcagccatcatgatccttttaaaatgcaagtaagaacagttgctcccagagtcccatctcatgttttggagtgctggtcacaggcgtcactgtggcctccagggctctgcaggatctgaatatgccctgagcccagctcatggccagccattctcccatgactcacagctcaccagccaaaccagctgctttgtgctccttgaagtgtgaacacatggacacactcttggccacagtgctagtgtggctcatgcttcatctgctcatgtttcttctttatggaggttttcctcaccacctcatcaaaacgatgcttctgcctatcctctagtcccattttctgttatttttttcacagcagttcttgccacctgacatttttcacatttatttacctatttatttattttctgttttcccaactaaagtgaacgtggtgctttgtggttttgctgtctccagtgcctagctcaatgtctgaaacatagtagatttttcttaaatatttgcttagtaaatgaattttactgctcagtgggcaccactcttacccctgagaaagagtcctatcatttttctaaataggccaggagaagaggtcctgactgctatcattaatcactagttagtccactacttttgcctaatggagtaaacatatcctaataactttttcccaatgtttgcttacaaagtcccttctggatcaaattcttatgttagagaaagaaaacagtgtaagatgcatttgaaagaaagcataattccatttgccttttattgccgcatatcactataggcctatggagtgaccaatacaaaatgaaaaatattctcctaatatttgtaaactttcacttagaaaaacttctcattccctgaactcttttcataccccgagaaaaaaatacttaatggtaaatgttttaaaaagcaagcttacatttacttgttatgagtggatttctctataagtcttagtatatatcagagaaaaaaacatgttctaaaacttctcaatgtttgctaacaaattcctttctgtgttaaacccttccaatcactaaaaaatagtttataattcttttgatcaaagtataatttcttacaaatgtttttctatataaaaatttttcattcactttaataaaagttaatgatatatcctaagaaaaactctttcttacatttgctttttattgctggatgtctttattggtagatgaaggccagaagaagtaaaaagaagttcaaattacatatatatatacacacacacacacacacacacgtatgtatatatacatacatatcatatatatgatatgatataacatatatatgatatgtatatccatatcatatatatatgttatatcatatcatatatatatcatatatcatatcacatatatcctatatcatatatatcatatatcatatcatatatcatatatatataattgattagaaaatagttttcttgtacaactcgttcatgcactgaaagaaaacagttgatagtaaattttgataaaagcaagcctgacattgactatttataggtggattgctctatcgtcctctaggccaggggtccccaatccctgggccatggaccactactgctctgtggcctgttaggaactgggctgcaaagcaggaggtgagtggagggtcagtgagcaaagctgaactccaactcttattgtgaactgcccctgcgagggttctaggttgcacactccttatgggattctaatacctaatggtctgtcactgtctcccatcacccccagacgagaccatctagttgcaggaaaacaatctcaggcctcccactgattctacattatggtgggtatgtaatgataatagaaataaagtgcacaataaatgtaatgagtttgaattatttcgaaattatctctccaccatatgtggaaaaattttcttccaagaaactggtccctggtgccaaaaagtttggagcccactactctagatggctattagcaaaatgaatatgttctaatacatattcctcaatatttgcttacaaatgccattttgtgacaaattctattcactgacaggaaacagtacatgatgagtcctagggggaggatgattacaaatttattttatatctaaatatctctctaagtctataagcactgaatgagaaaaaaatatattcatataacatgttctaaactttcactttgaaaaacatcttattcatccaaattttctattaactgaaagaaaagttaacaaagaatcatgaagaatgcaagcttacatttactttgtatgcacagatttctctattggcctcctggcataaatggacaaggacacatgttctaataacctattttccaaatttgcctaaacatgccttcctgtgtcaaactcttctatgcactgaaaaaaaaaataacttatgatgcatcctcaaagaagtataattacattttccttttattgctgggcatctgtgttggctgatgagggctccaaaaacccagaaatatattagaatactgtattagtccattttcacgctgctgataaagactacctgagactgggaaaaaagaaaggtttaattggacttacagttccacatggctggggagtcctcaaaatcatggcaggaggtgaaaggcatttcttatatggtggtggcaagaaaaaatgagaaagaagcaaaagtggaaacccctgataaacccatcagatctcatgagacttattcactatcatgagaatagcatgggaaagaccggcccccatgattcaattacctccccctgggtccctcccacacatgtgggaattctgggagatacaattcaagttgagatttgggtggggacagagccacaccgtatcattccacccctggacccctccaaatctcatgtcctcaaatttcaaaaccaatcatgccttcctaacagtaccccaaagtcttaactcatgtcagtgttaactcaaaagtccacagtccaaagtctcatcggagaaaaggcaagtcccttatgcctatgagcctgtaaaatcaaaagcaagttagctaattcctagatacaacaggggtataagcattgggtaaatacagccattccaaatgagagaaattggcaaggggatgcaggcccatgcaagtccgaaatccagcaaggcagtcaaatcttaaagtttcaaaatgatctcctttgactccatgtttcacatccagttcacgctgatgcaaaaggtgggtttacatgggcttgcgcagctccgcccctgtggtctggcagggaactgcctccctcccagctgcttttatgggctggtgttgagtgtctgtggcttttccaggtgcacggtgcaagctgtcggtggatctaccattctggggtcttaggatggtggctctcttctcatagctccactaggcagcaccccagtggggactctgtgtggagtctcccaccccacatttcccttccatactgccctagcagaggttctccatgagggccccagccctgtagcaaacttctgactggacatctaggtatttccatacatcctctgaaacctaggtggaggttcccaaacctgaattcctgacttctgtgcacccacaggctcaacaccacatggaagctgcaaggcttgaggcttgcacccactgaagccatggcctgagctctatgttggcctctttcagtcatagctggagtggctgggacacagggcaccaagtacctagaatgcacacagcatagggaccctgggcctggtccaggaaaccatcttttcctcctaggcctctgagcctgttatgggagagactgctgtgaagacctctgacatgccctggagacattttctccattgccttgggtattaacattacttatgcaaatttctgcagctgacttgaatttctcctcagcaaatgggtttttcttttctattgcattgtcaggctgcaaattttccaaacttttatgctctgtttcccttttgaaactgaatgcctttaatagcacccaagtcacctcttgaatgctttgctgcttagaaatttcttctgccagataccctaaatcatctctctcaagttcaaaattcctcaaatctctagggcaggagaaaaatgctgccagtctctttgctaaaacgtaacaagggtcacctttactccagttcccaacaagttatgcatctccatctgagaccacctcagcctggaccttattgttcatatcactatcagcatgtttgtcaaagccattgaacaagtctctaggaagttccaaactttcccatattttcctgtcttcttctgtgacctccaaactgttccaatatctgcctgttacctagttcaaaagtcgcttccacattttcaggtatcttttcagcaatacccactctgggtatcaatttactttattagtctgtgttcacactgctgataaagacatacctgagactgggagaaagagaagtttaactggacttgcagttccacatggctggggaggcctcataatcatggcgggaggtgaaaggcatttctcatgtggcagcagcaagagaaaatgaggaagaagcaaacgcagaaacttccaatgaacctattagatctcctgagacttattcactatcacaagaatagcatgggaaagcccggcccccatgattcaatttcctcccctgggtccctcccacaacacatgggaattctgagagatataattcaagctgagatttgggtggaaacacagccaaaccatataaaataccatatacgaaatttttagttaaaaaaattatctcattcattcaactattttattcactgaaataaagcagttagtgacagatctggaaaaaagttaacctacatttactgtttaaatttatgaatatcttttctggctgttggtgtctattggagaaagaaacatgtcctaataatgtcttctcagtgtctaagtacaaattatttttgtgttaaactcctctattcgttattttaaaaagaagttcttgatgcatcttatggaaagcatgcttacatttgcctctgattgcgtgacatctctataagcccataagagcccgatagggaataaaaatgttcaaattatataacacaaacctttacttagaaaaggatcttcttcttcaagctctttcattcactgaaagaaaacagttaattatgaatcttaaagaaagcaagcttacttttactctttataggtggattttctattggtctcttgctgtctactagaaaaagaaacatgttataataatttcttctttgtgtttgcttaaagatgattttttttcaaactctccatttacagaatgaaagaatactgtgatgcatcttaaggaaatcataattaaatttgctgttttttttctggatagctctactggccaatgagggcccaaagaagaaagaaaaatgtttcaataacatgttctcagttttcacttagaaaattatcttgttcataaaaatcttagacttactgaaagaaacagtgaatgatgaatcataaaaaaaaagcttacatttactttttatacgtgtatttttctattggcctattggtgcctattggagacagaaatatgttctaataacttctcaatatttgcttacaaacacctttctttttgaaacacttcaaataaaaaaagagtttattatgcattctaagaaaaccataattacacttctcttttattgctaaaaatgtctttaggcctacgtggttacaatgggcatagcaaaatgttcaaataacgtgttctaaacttttggttagaaatgcatctcacttatcaaattcttctattcactgaaagaaaacagttaatgattaatcttgcagaaaacaagcttacatttactttttataggtggatttctctatcagcctcttggtgctcattggagaaaaaccatgttctaataatttcttctaaatgtttacttacaaatgccttttagtgtcgaactcttttattcactgaatgaaaacagtttacaatgtttcttatgggaagcatgactacatttgccttttgttgctggatatttctgtatgtctatgaaatctcagtggaaagagaaaaatgttcaataacatgttctaaacttcactgagaaaagcatcacagtcaccaaacattccagttcattgaaataaaacagtaaataatcaatcttgcagaaagtaagggtacctttactttctatgggtggagtttttttgttttttggacttggcacctattagagaaagaaacatgaccttctcaacatttggttataagttccttttttgttaaactatcattcatggaaagaaacaggttataacgctttttatggaaagtatgtttccacttgcctcttattactgcatatctctataggcctatgaggtgtcagtaggaagaataatgttaatatgttctacaatgagaacacatggacatagggtgggaacatcacacaccagggcatgtcggtgggtggggggctgggggagggatagcattaggagaaataactaatgtaaatgatgagttgatgggtgcagcaaaccaacatggcacatgtatacctatgtaacaaaacttcatgttgtgtacatgtacccaaagacttaaagtattttatatatatatatatatgttctaaacttaactgagtaaaaaaatctcatttgtcaagtgcttccatttgttgaaagaaaacagttaatggtaaatcttgaagaaagtaagcttacatttactgtttttttggtaactttttttgaatcttggcatctattacaaaaagacacaagtactaataacttattctcaatgtttgtttacaaactccttttctttccagctcgtctatccactggaaaaaaggagttaatcatgtacccttaaaaaagcattattacttttttttttttggagatggagtctcgctctgttgcccaggctagagtgcagtggcactatctcagctcactgcaacctctgcctcctgggcccaagtgattcttccacctcagcctcccgagtagctgggaccacaggctcacaatgccatgcctggctaattttttgtattttttttttttttagtagagatgggggtttcaccctgttgcccaggctggtctcaaactcctgaagtcaggcaatccacctgcctcggcctcccaaagtgctaggattacaggcatgagccaacatgcccagccgcattattacattttttaaaagctggatgtatccataggtccacgagggcccaaatggaaaaaaaaatgttcaaataacatgttcaaattttttttaaaaagatattggagaggagaaaagccaagagggatgacctgacacggtgaagaggaacttctccctgggagaccagacaatcaagaagaccagtactccaagcagattgtcagaaagaacacattgagagtgtgtggaggaaggacacagacactaggctgaagagagagaaatgtggaaaccctgcaaagggttgccaagcaccaggacttgttcctcgccttatgcagctcttggggaaagggtgagttaaataggcatggagtggttcactctcaccatggacctccagaatcctagctgcagaagaccccatgatcccctggacatctcagatggcagggagagctgtttgaagagctggcagagaggggactccagcctttgtgtagcccaaagggtttggcatgggaacaactgcagtgtagcatggccagggatgcccatcccccaaggctcaccccactcgtttaggtagctttggcgtttcttggctgttggacccaagtagaacagagctaccttgcccatgggatggagccattctgatctgaacacccccgtctgccagtctctcctagagtccctgcctggccccacccactaacagtgcagcctcagatgctcaaacaaggtgtttcccagtggccaccaccataggtccttcactggaagaccacacctaactatcagagagcttctgttcaagggaccccaacagcacacaactgtccacagcctgccctgactgcttcactggcacacacttgcctgcagcatcctcccaccattttgatggcatgtaactgccccaaatctgccaactgctttgctggtgcatgttagtgtgtgggcctcaccatcctggtgccatcagtgtaaatgtatgcacagatcctgctgagccaccaccctgccactgctggtgcacatgtggaccctgctgcaccactgtcccactgccaccagtgtgtgaacacgtgtggaccctgccatgctgctgccacttgtgtacacacaggcatgcacacaaatgctgccataccattgccctgttgctgctggaatgtacaagtgcacgccctgctgccattaccctgatgaagcccttttagcagcacccccatcaaagtgtttttgccagcagacccagaacgccttgctacctccagtgaagtggatgtttaacattgaagagccagagaacaaagccatgggcctggtcccaggccccagtgttggagtatacagcccaggagcactgagctgagcctcagccccctgaaattatccagttaaatagccagccaactgaacccaaatgtcaccacagtaaagtcctcaaggatatcaagaatataagagcaaaaagctccatcaaaagaatagcaaattcaaaaattaaagaaacatcactccacatagataagagaatcagtgctagaactctggcaactgaaagagcagacgtgtcttcctaccttcaaatccccaaactagctcctcattaatttagccagacagaaattactgaaatgtcagacatataatgcagaatctatatagcaatgaagatcactgagattcaggagaaagttgaaacccagtccaaggaatctaaggaaatcaacaaaatgatacaagagctgaaatacaagataaaaccactttaatgcaaaaccaaactgatctaatggagctgaaaaactcactacaagaattttataaaacattaacagcagaatagaccaagctgaggaaagaatttcagagcttcaagactggttcttcgaactgactcagtcaaacacaaatttaaaaaaagaactttgaaataaacaaaatctctgagaaataatacatttatgtaaagagactaaatctatcatgcattagtgtccctgaaatggagagaaagcaagcaacttggaaaacatatttgagaatattgttgatgaaaaatttctcagctttgctagcaaagtcaccattcatggtcagaaaatttagagaaccccttcaagatagacaagaaggccctcctcaagacacagagtcagcatattcttcagggtgaatacaaaataaaaaatactaaaggcaagtggagagaaagggcaggccacaaacaaagggaatcccatcagcttaacagcagacttttcagcagaaatcctataaaccagaagagattgagggcctatattctgtatccgtaataaaaaattccaaccaagaatttcatatccagccaaactaagcttcataagaaaaaaaaatctctaattcttttcagataagtaaatgctaaggcaatgatcaccagaccttccttaaaagagatcctgaggaaatgctaaacatggaaatgaatgactgttactagccaccagaaagcacatttacgtacatagaccaaggacactataaagcaactacaaaattaagtctacataaaaaccagctaacaatatggtgacaggattaaatgtacacatatcaataaattttgaatgtgaatggaaaaaatgggaataaatgcaccacttaaaagtcacggaatggcaagttggataaagaagcaagacaactgcgtgctctattgaaaatacccatcttacctgctatgacactcaaaggctcaaattataggaatatataaaaatttaccaactaaacaaaaaaagcagaatttgctattcttatttcagacaaaacagactttaatcaacattaatgagaaagaacaaagaaaggcattacacaatgataaagggttcaattcaagaagacttaactatcttaaatatgtatgcactcaacatcacagcacctagatacataaagcaagttcttagaaacctacaaagagacttagataccacataacaataccaaacaacttcaacaccccactgacagatcatcgaggcagaaaagtaaaaaaaagacactcaggagaataccccactaagatggccgaataggaactgctccagtctgcagcacccagcgtgagcgacacagaagatgggtgatttctgcatttccaactgaggtaccaggttcatctcactcgggcttgtcagacagtgggtgcagcccatggagcagggtggggcatcgcctctcccaggaagcacaagcggttgaggaattccctttcctagcaaagggaagccatgacagacagtacctggaaaattgggacactcccaccctaatactgcacttttccaacagccttagcaaacagcacaccaggagattatatcctgtgcctggctcagagggtcccacacccacagagcctcactcactgctagaacagcagtctcagattgaactgcaaggtggcagctaggcttggggaggggtgtctgccattgctgaggtttgagtaggtaaacaaagtggccaggaagcttgaactgggtggagcccactgcaactcaaggaggcctgcctgcctctgtggactccacctctgggggcacggtatagctgaacaaaaggcagcagaaacttctgcagacttaaacgtccctgtctgacagctttgaagagagtagtggttctcccagcacggagcttgagatctgagaatggacagattgcctcctcaagtgggtccctgacccccgagtagcctcactgggagacacctcccagtaggggccaactgacacctcatacagccgggtgcccctctgagatgaagcttccagaggaaggatcaggcagcaacaccttccgttctgcaatatttgctgttctgcagcctccgctggtgatatccaggcaaacagggtctggagtggacctccagcaaactccaacagacctgcagctgagggtcctgactgttagaaggaaaattaacaaacagaaaggacacccacaccaaaaccccatccgtatgttaccatcatcaaagaccaaaggtagacaaaaaccacaaagatggggagaaaccagagcagaaaagctgaaaattctaaaaatcagagtgcctcttctcctccaaaggaacgcagctcctcaccatcagtggaacaaagctggatggagaatgactttgatgagttgagaaaagaaagcttcaaatgatcagtaataacaaacttctctgagttaaaggaggatgtttgaacccatcacaaagaagctaaaaaccttgaaaaaagattagacaaatggctaactagaataaatagtgtagagaagtccttaaatgacctgatggagcttaaaaccatagcacaagaactacgtgatgcatgcacaagcttcaatagcagatttgataaagtggaagaaagggtatcagagattgaagatcaaatgaatgaaatgaagcgagaagagaagtttagagaaaaaagattaaaaagaaatgaacaaagcctccaagaaatatgggactatgtgaaaagaccaaatctacgtctgattggtgtacctgaaagtgacggggagaatggaaccaagttggaaaaccctcttcaggatattatccaggagaatttccccaacctagcaagtcaggccaacattgaaattcaggaaatacagagaacgccataaagatactcctcgagaagagcaactccaagacacataatggtcagattcaccaaagttgaaatgaaggaaaaaatgttaagggcagccagagagaaaggtcgggttacccacaaagggaagcccatcagactaacagtggatctcttggaagaaactctacaagccagaaggcagtgggggccaatattcaacattcttaaagaaaagaattttcaacccagaatttcatatccagccaaactaagcttcataagtgaaggagaaatagaatcctttacagacaaacaaatgcggacagatgttgtcaccactaggcctgccttacaagagctcctgaaggaagcactaaacatgcaaaggaacaaccagcaccagccactgcaaaaacatgctgaattgtaaagaccatcagtgctaggaagaaactgcatcaactaatgagcaaaataaccagctaacatcataatgacaggatcaaattcacacataacaatactaaacttaaatgtaaatgggctaaatgctccaattaaaagacacagattggcaaattggataaagagtcaagacctatcagtgtgctatattcaggagacccatttcatgtgcagagatgcacataggctcaaaataaaaggatggaggaagatctaccaagcaaatggaaaacaaaaaagaagcaggggttgcaatcctagtctctgataaaacagactttaaaccaacaaagatcaaaagagacaaaaaaaggccattacataaaggtaaagggatcaattcaacaagaagagctaactatcttaaatatgtatgcacccaatacaagagcacccagattcataaagcaagtccttagagacctacaaagagacttagactcccacacaataatcatgggagactttaacaccccactgtcaacattagacaaatcaatgagacagaaagttaacaaggatatccaggaattgaactcagctctgcatcaagtggacctaatagacatctacagaactctccaccccaaatcaacagaatatacattcttcttagcaccacaccgcacttactccaaaattgaccacatacttggaagtaaagctctcctcagcaaacgtaaaagagcagaaattataacaaactttctctcagaccacagtgcaatcaaactaaaactcatgattaagaaactcactcaaaaccactcaactacatggaaactgaacaacctgctcctgaatgactactgggtacataatgaaatgaaggcagaaacaaagatgttctttgaaaccaaagagaacaaagacacaacatatcagaatctctgggacacatttaaagcagtgtgtagaaggaaatttatagcactaaatgcccacaagagaaagcaggaaagatctaaaattgacaccctaacatcacaattaaaagaactagagaagcaagagcaaacacattcaaaagctaagagaaggcaagaaataactaagatcagagcagaactgaaggagatagagacacaaaaaaaacccttcaaaaaatcaatgaatccaggagctgatttttagaaaagatcaacaaaattgatagaccactagcaagagtaataaagaagaaaggagagaagaatcaaacagatgcaataaaaaaaatgataaaggggacatcaccaccgatcccacagaaatacaaactacgatcagggaatactataaacacctctacacaaataaaacagaaaatctagaagaaatagatgaattcctggacacatacaccctcccaagactaaaccagggagaaattgaatccctgaatagaccaataacagattctgaaattgaggcaacaattaatatcctaccaaccaaaaaaagtccaggacaagatagattcacacccaaattctaccagaggtacaaagaggagctggtaccattccctctgaaactatctgaatcaataggaaaagagggaatcctccctaattcattttatgaggccaacatctcctgataccaaagcctggcagagacacacacacaaaaagagaattttagaccaatatccttgatgaacatccacgcaaaaattcccaatataatactggcaaaccgaatccagcagcacatcaaaaacttatccaccacgatcaagtgggcttcacccctgggatgcaaggctggttcaacgtatgcaaatcaataaatgtaatccatcatataaacagaaccaaagacaaaaagcacatgattatctcaatagacacagaaaaggcattcaaaaaattcagcagcccttcatgctaaaaactctcaataaactaggtattgatgggacgtagctcaaaataataagagctatttatgacaaaatgatagccaatatcatactgaatgggcaaaaactggaagcattccctttgaaaactggcacaagacagggatgccctctctcaccactcctgttcaacacagtgttggaagttctggccagggcaatcaggcaagagaaagaaacaaagggtatttgattaggaaaacaggaagtcaaattgtccctgtttgcagatgacatgactgtatatttagaaaaccccatcatctcagcccaaaatatccttaagctgataagcaacttcagcaaagtctcagaatacaaaatcaatgtgcaaaaatcacaagcattcctatactccaataacagacaaacagagagccatagcatgagtgaactctcattcgcaattgcttcaaagagaataaaatacctaggaatccaacttacaagggatgtgaaggacctcttcaaggagaactacaaagcactgctcaacgaaataaaagaggacacaaacaaatggaagaacattccatgctcatggataggaagaatcaatatcgtgaaaatggccatactgcccaaggtaatttatagattcaacgccatccccatcaagctaccaatgactttcttcaaagaattggaaaaaagtactttaaagttcatatggaaccaaagctggaggcatcatgctacctgacttcaaactatactacaaggctacagtaaccaaaacagcatggtactggtaccaaaacagagatatagaccaatggaacagaatagagccctcggaaataataccacacatctacaaccatctggtgtttgacaaacctgacaaaaaacaagcaatgaggaaaggattccctatttaataaatggtgctgggaaaactggctagccatatgtagaaagctgaaactggatcacttccttacatcttatacaaatattaattcaagatggatgaaagacttaaacgtcagacctgaaaaccataaaaactctagaagaaaacctaggcaataccattcaggacataggcatgggcaaggacttcatgactaaaacaccaaaagcaatggcaacaaaagccaaaattgacaaatgggttctaattaaactaaagagcttctgcacagcagaagaaactaacatcaaagtgaacaggcaacctacagaatgggagaaaatttttacaatctacccatctgacaaaggtctaacatccagaatctacaaagaactttaacaaatttacaagaaaaaaatcaaacaaccccatcaaaaagtgggcaaaggatatgaagagacatttctcaaaagaagacatttattcagccaacagacacatgaaaaaatgctcatcatcactggccatcagagaaatgcgaatcaaaaccacagtgagataccatctcacaccagttagaatggcgatcattaaaaactcaggaaacaacaggtgctggagaggatgtggagaaatagcaacacttttacactgttggtgggactgtaaactagttcaaccattgtggaagacagtgtggcgattcctcaaggatctagaattagaaataccatttgacccagccatcccatcactgggcatatacccaaaggattataaatcatgctgccatgaagacacatacacacatgtttattgcagcactatccacgatagcaaagatttggaaccaacccaaatgtccatcaatgatagactggattaagaaaatgtgatacatatacaccatggaatcctatgcagccataaaaaatgatgagttcatgtcctttgtagggacatggatgaagctggaagccatcattctcagcaaactatcgcaaagacagaaaaccaaataccgcatattctcactcataggtgggaattgaacaatgagatcacatggacacaggaaggggaatatcacactctggggactgtggtggggtggggggaggggggagagatagcattgggagatatacctaatgctagatgacgacttagtgggtgcagcacaccagcatgtcacatgtatacatatgtaactaacctgcacaatgtgcacatgtaccctaaaacttaaagtataataaaaaaaaaaaatacattactcctttccgaaaaaaaaaaaaataataattctcaaataacttaaaatagcactaccattcaacccagcaatcccattttttggttatataccaaaataaataaatactattttccccagaagacacatgtttgtttttgttcattgcagcgatattcacaatagcaaagacatgcaatcaaacctaggtgcccatcaactgtagcctggataaggaaaatgtggcacatatacactatgaaatactatgcagtcataaaaaaagaatgaaatcatgtatttttcctaccaacatagatgcagctggaggccattaccctaaagtgaattaattcaggaacagaaaaatcaaatactgcatgttctcatgtataagtgtgagctaaacttttgagtacacataaacacaaaaaggaaaaccataaatgccagggcttacttgatggtgaagggtgaaagttagaatcagaaaactacttattgggtactatgctcactacctgtgtgataaaatcatttttacaccaaaccccagtgacacacaatttactcatgtaagaaatatgcacatgaacccctgaacttaaaagttggaaaaaaaccttggtcttctcttaaaattactgggtttcttttggagagactataataagagtttataaaaggctttttaaaactctctttacacaaacttcttggaaaaaaaaattctgtgtttaatcaaaataatttattgtgctctgtattttattaggtcttctgattagtaagaaaactgagtcttcctaatattaaaaaatttagagttttttgagaactatgtaacttttctgtatttgcctcttttttcataacgtgattccattaagtgttttaaatattttgtttgatatttttgacaaagttctcaaaagaaacttttaattaagtctttctgaccttgaattaacttacaataactacagagggtccctgagacatctgagatttgaaaaagagagatattaagctagtttgaattatttggtatgtaaaattatatgtgaagaaatgtcaaataagaaatgtttaattttttttcaatatgacattggaggcaatgttagcatgtgtctcccatgcagaaaggcaaaacatttgtaaatattcatgctgtgaacctttttccaagatgcagcacagaaatttatcagaaaaactgaaagaaagcatagactgtttgaatgaagtggtgggctgcagcttacactgtgagccaggcagaaaacatccaacaagagacaatgaacctattcatgaacccagcacatcactactacaaccagagtctcagaaagccatcacacaaaaattctctataaccaagaaattcatacagagtctttgccactgaaagcactcagagctggaactaggtaacaataatctgtaaacattaaaatcacattcttgaccatgtgtggtgactcacacttgcaatcccagcactttgggaggcagaggcaggtggataacttgaggtcaagagttcgagaccagcctggccaacatcatgaaacctcgtctctaccaaaagtacaaaaattagccgggtgtggtgacacgtgcttataatcccagctactcaggaggctgaggcaggagaatcacttgagcccaggaggcaaaggctcctgcactccaggctgggtgacacagtgagactttgtctcaaaaaaaaaaaatttacgttctgaagaaaaaaaaaaccagtataatcaaccacaaattcaaaagtaattacaagaaatagtctacaccaaagagaaagaaccaaaaaaccaattctagcaatatgaagaaaaaaaaaaaccccaggattttctaatcctctaaaaaggtcacactaactgtccagcagtggatccaaactaagatgaaatccttgaaataccagataaaaaattcaaaaagttcattaatttgttcaaggagatacaaaacaaaggtaaaaaccaacataaagaaattttaaaaattcaggatattaataaaaacttttctaaagagatagattattttaaaggaaactcaatcagaacttctgcaatcaaagacacttttagggaactacaaaattcagtagaaaattttaacaacagactagaccaaatataagagagtttaagagcttgaagacaaaacttttgtattaaccgaatcagaaaaaaaaaatcaaaaatgatcaaattcctcaatgaataggagattatgtaaaacagccaaacccaagaacaaaaggtatttctgggtgagaagaaaaaacaaaattttagaatacctatttgagagaattattggtaaaacttccttggtgttgctaaatatctagatatccaaatacaagaagctcaaaaaacttctgtaagattaattccaaccagtatatcaccaaggcctaagtttaatgtgaaggaaagaattctaagagcagtgagacaaaagcatcaggtaacttatgaattaaaacctatcaggttaacagcaaacttctcaacagaaaccttacaagccagaagtgattgggatgctaactttagccttctaaaaaaaaaaaaatgactgtcaaccaagaattttatatccagtcacactgttacataaatgaagggaaaaaagtatttctcagataagcaaatgatgaggaaatttgtcactactagacaagtcctacagaaaatgctaaaagaaaaaattcaatttagaaacaaaaggttgatacacactacaacagaaactcttaaaagcataaaactaacagggcttataaaacaataacacaatggagaaaacaaagtcacttgataacaacatgatgactggaaaattacctcacatctcaataccaacatagaatgtaaatggtctaagtgctctacttaaaaaatacagacaggtagaataaaatatattacaaaacaaatatctgccttcttcaggagacacacctaatacataaagattctttaaaattcaaagtaaaggggtaaaaaaagatatttcatgcaaatggaaaccaaaagcaaataggagtagatattcttataacagaaaaacagactttaaagaaacaacagtaaaaaagacaaagaagaacattatacaataatacaataatcaactatatgataacatatgataatcctaaatatatatgcattttactctggagctcccagattcataaaactattactactagactaataaaagagatagacagcaatacaataataatggggaattcaatattctactgacagcactagacagatcatcaaggcagaaagtcaataaagaaaccctggacttacactgtagtctagaacaaatgggcctaacagctatttagaaaacattctacccaagacgtacagaatatacactcttctcagcaacacatgaaacattctccaacatagaccatataatatcccacaaaacaagtatcaatatttttttaatattgaaattatatcaagttgcttcacagaccatagtggaataaataaaactaaaagtcagttacaaaaggtcccttaaacctatacatgtacatagaaattaaactgtctgctccggaataatttttggattaacaatacaatcaataaaattttaaaaatatttgaaatgaatgataacagggaaacaaggtatcaggacctctggaatacagcaaaaccagtgctaaaaggaaaattcacaatgccaaatacctacatcaaaaaggctgaaaagaatctggatggcaagaaagatcatcgagattcaggagaaagttgaaacccattccaaagaaactaaagagtccagtataacaattcaaaaaatgaaagatataatagccattttaatatagaaccaaactgagctaatagagctgaaaaactcactataagaattttacagcacaaacagaagtactttttatttaaattttaattgaagttcaggggtacataaacaggttttatataagcaaatgcatcatggcagtttgttgtacagattatttcatcacccaggtattaagcatagtatccattgttattttcctgatcctctccctcctacaaacctcctctctttgataggcagggggtgttgttcccctctatgtgtccatgtgttctcatcatttagctctcatttacaagtaagaacatgtagtatttgtttttctgtttctgcattagttttctaaagataatagcctccagctccatccttgctcctgcaaaggacatgatcttgtttgttttcataactgcatactattccctggtgtatatgtaccatattttctttatccagtctgttactgataaacatttaggttgattccatgtgtttggtattgggaataatgctgcatgcatgtatctatataatagtagaatgttttctattcctttgggtatagacccagtaatggaattgctgggtggaatggaaattctatttttaggtctttgaggaattgccacactgtcttccacaatgattgaactaatttacacttccaacaatgtatgtgttcttttttctccacacctctgccagcatctgttattttttgactttttaatactagccattccaactgatgtgagatggtatctcatggtggttttgctttgcatttccgtaatgctcagtgaagttcagctttttaaaatatgcttgttggatccacatttgtcttcttttgaaatgtgtctgttcgtgtttattgcccactttttatttttttattttttattattatactttaagttttagggtacatgtgcacaatgtgcaggtttgttacatacatatacatgtgccatgctggtgtgctgcacccattaactcgtcaattagcattaggtatatctcctaatgctatccctcccccctcccccaccccacaacagtacccagagtgagatgttcccttcctgtatccatgtgttctcattgttcaattcccacctacgagtgagaacatgcggtgtttggttttttgtccttgagatagcctactgagaatgatgatttccaatttcatccatgtccctacaaaggacatgaactcatcatttcttatggctgcatagtattccatggtgtatatgtgccacattttcttaatccagtctatcattgttggatatttggattggtttcaagtctttgctattgtggatagtgccacaataaatatacgtatgcatgtgtctttatagcagcatgatttatagtcctttgggtatatacccagtaatgggatgggtatatacccagaaatggtatttctagttctagatccctgaggaattgccacactgacttccacaatggttgaactagtttacagtcccaacaacagtgtaaaagtgttcctatttctccacatcctctccagcacctgttgtttcctgagtttttaatgattgccattctaactggtgtgagatggtatctcactgtggttttgattcgcatttctctgatggccagtgatgatgagcatttgttcatgtgttttttggctgcataaatgtcttcttttgagaagtgtctgttcatgtcctttgcccactttttgatggggttgtttttttttttcttgtgaatttgtttgtgttcattgtagattctggatattagccctttgtcagatgagtaggttgtgaaaattttctcccattttgtaggttgcctgttcactctgatggtagattcttttgctgtgcagaagctctttagtttaattagatcccatttgtcaattttgccttttgttgccattgcttttggtgttttagacatgaagtccttgcccatgcctatgtcctgaatggtaatgcctaggttttcttctagggtttgtatggttttaggtctaacgtttaagtctttaatccatcttgaattaattttcgtataaggtgtaaggaagggatccagtttcagctttccacatatggctagccagttttcccagcaccatttattaaatagggaatactttccccattgcttgtttttctcaggtttgtcacttacaagggacttgaaggacctcttcaaggagaactgcaaaccactgctcaatgaaataaaagaggatacaaatggaagaacattccatgctcatgggtacgaagaatcaatatcgtgaaaatggccatactgcccaaggtaatttatagattcaatgccatccccatcaagctaccaatgactttcttcacagaattggaaaaaactactttaaagttcatacggaaccaaaaaagagcctgcatcgccaagtcaatcctaagccaaaagtacaaagctggaggcaccacgctacctgacttcaaactattctacaaggctacagtaaccaaaacagcatggtcctggtatcaaaacagagatatagatcaatggaacagaacagagccctcagaaataacgccgcatatctacaactatctgatctttgacaaacctgagaaaaacaagtattgcccactttttaatatcgttggttgttgtcttctcataaatttaagtttcttatagatgctgaatactagacctttgtcagatgcatagtttgcggtatttttctcccattctgcaggttgtctgtttgctctgttgattgtttcttttgctatgaataaatgctttagtttagttagatcctatgtgtcaatttttgcttttgctgcaattgtttttggcatctttgtcataaaatctttgctcatgcctatgtcctgaatggtattgtctaggttgtctttcagggtttttatagttctgggttttacatttaagtctttaatccatcctgtgttaatttttgtatatggtgtaaagaaagggtccagtttcaatcttctgcatatggctagctggttatcccagaaccatttattaaacagagagtccttttccgattgcttgtttttgtcaggtttgtcaaagatcagatagttgtaggtgtgtggccttatttctgggttctctattctattccatagatctatctgtttttctaccagtaccatgctgttttggttactgtggccctgtagtatagtttgaagtcaggtagtgtgatgccttcagctttgttctttatgcttaggattgccttggctattcaggctctttcttgattccatatgaattttaaaatagtttttttcaattatgtgaagaatctcagttgtagttttatagaaataacattgaatctacaaattgctttggccagcatggccattttaacaatattgattcttcttatctcttgagcatggaatgtttttccacttgttcatgttatctttgatttcttggagcaatgttccatatttctccttgtagagatctttcacctctctggttagctgtattcctaggtattgtattttatttttttgtggcaattgtgaatgcgattgaatttctgattaggctcttggcttgactgttgtcagtgtataggaatgtcaataaattttgcacattgattttacattctgagactttgctgaaattttttaggataatggagcttttgggctgagattattgagtattttagatatagaatcatgtcatctgcaaacagtgatattttgacttcctctcttcttatttggatgccttttatttctttctcttgcctgattgccctggctgggacttccaatactatgttgaataggagtggtgagagagagcatccttgccatgtgccagtttacaagaggaatgcttgcatcttttgcccattcagtatgatgtttgctgtggtttcatcacagatggctcttattattttgaggtacgtttctttaatacctagtttattaagagtttttaacaagtagtgttgaattttaccaaaagccttttctgcttctattgagataatcatgtggcttttgtctttagttctgtttatgtgatgaatcatatttattgatatacaaatgttgaaccaaacttgcaacccaatggataaagcctatttgatcttagtggatgagcttttggatgtgctgctggattcagttcgccggtattttcttgaggacttttgcatcgatgttcatcaagatattaagctgaagttttatttttttgttgtgtccctgccaggttttggtatcaagatgatactggtctcatagaatgagttagggaggagtcccttctcctcaatttttttgaaatagtttcagcaggaattgtgccagctctttgaacatcttgtagaattcagctataaatctgtctgatcctgggatttgttttgttttttaggcaatttattactgactcaatttcagagctcattattggtttgctcaggtatgcaattacttcctggttcagtattgggagggtgtacatgtctaggtatttatccatttcttccagactttctagtttatatgcatagaggtgtttataatattctctgatgactgtctatattcctatggggtgactggtaatatctcccttgtttcagattgtatttctctgaatgtttttcttctttattagtctagctgtggtgtctgtttcatttttttcccaaaaagctagctggagaattcattgatcttttgaataaattttcatgtttcaatctccttcagttcaactctcattttggttatttcttgtcttctgctagctttaagattttttactcttgattctctagttctcttagttgtgatgtcacattgttatcttgagatttttctacctcaagttagaagtagaaacttctttctacttttgaggtgataatttagtgtcccagagattctggtatgttgtttctttgttctcattagtttcaaaaaacctcttgatagctgccttaatttcattatttacccaagagtcattcatgagcaggttattcaatttctatgtaattttatgattttgagtaaatttcttagtctttctttctaatttgatttcaccatggtctgagtgattgttatgatttcagttttttgcatttgcgaaagagtgttttacttctgattatgtgactgattttagagtatgtgccatgtggcaatgagaagaatgtatattctgttgtttttgggtggagagttctgtagatgcctatcaggaccatttgatccaatgctgagttcagagcctaaacatctttgttaatctttcatctcaatgatctaatattgacggtggagtatttgtctctcaatattattgtgtgggagtctaaatctctttaaaggtctctaagaacttgctttatgaatctgggtgctcctgtatttggtgcatatatattcagaatggttggaatttttgttgaactttttaccattacataattttttccatttgcttggtaaatttttctccatccttttattttgagcctatatgtgtcaatgcatgtgagatgagtcttttgaagacagcagcccaaggggtcttggttctttatccagcttgccactctgtgtcttttaattgggggcatttggcccatttacattcaaggttagtattgatatgtgtggatttgattctgtcatcatgatgttacctgaattttcaaacttgtttatctggttgctttatattgtgactggtctgggtccttcagtgtgtttttgtcaggagctctgggaagttatgtctggtggtaacaaatttcctcagcacttacttgtctgaaaagaattttatttcttctttgctcaggaagctttgtttagccagatataaaatattgggtggggatttgttttctttaaaaatgttgaatattggcccccaatctcttctggcttgtagaatttctgatgagagatctgccgttagtctgatggggttccctttgtcagtaacttaacatttctctctagctgcctttaacatgttttttccattttgaccttggagaatctgatgattaaatgtcttacggttacctttttgtgaagtatcttactggggttccctgcatttcctgaatttgaatcgtggtctctctagctaggttagggaagttgttatggatgatatctcgaaatacattttgcaagttggttccattctcccccatcactttcatggacaccaatgattcacagagtctgtctctacataattccatatttctcagaggttttgttcattttttttgccattcttttttctctgtttgtctgactgtcttatttatttcagcaagccagtcttcaagctctgagattctttcttccacttgctctattctgctttcagctccatcaggttggttatgttccttactatgctggctgttttgactgtcagttcctgtattgtttaatcatgatttttagcttccttggattaagtttcaatgtactcctgtagttcagtgatctttgttcctatctatgttctgaattctaattctgtcatttcagccatctcagctcacttcagaacctttgctggagagctgatgtgttcatttggaggaaaggaggcactgtggctttttgagttttcagggttcctgcactgatcctttcattttcgtgggcttattaccttcaatctgtgagacttctgacctatggatgagtttttttcttttatcctaattgataaccttgagggtttgattgtggtataaggtggattcagctgactggcttcatttctggaagatttatggtggccaacactcaactcccagctcctggactgcatgctctaaatctgggtgacttgtattctgtcccaactttgttctcttgctctttgaagtcaggaacccactgtgctgggggccaggggaagggaatatgctcctagtccactggtcactacactctgataggctgtgtcagccaaagtgttttgaagtgcagggacagtgggatccatcctccttcacacatgccgacagcaatggtagtggtagctgtggcagagtgataccaggtactaaggtatctgcctcccttcaaacctcaggtcctcgccaaagcttcttatacccttagttgactgccaggttgttgcaagtgcctaataacaggcacaatttcagaaagacccacaagatgtgaaattggctcaaactactgtggtaagtgtatcagaagtattaacagcagaataaaccaagctgaagatacaatttcagagcttgaagactggtctttgaatgaactcagacaaaaataatgaaaaaaggattttaaaaaatgaaaaaatttagaaatataggattatgtagagagatcaaatctatgacacattggcattcctgaaaagagagagagagcaatcaatttggaaaacatatataagaatattgtccatgaacatttctctaactttcctagttgagacttagcttcacatttcaccaaatggacctaacggacatctccacgatactccacataacaaaaacaaacattcaaattcaagaaattcagagaacatctgtgagatactctaatgactaagaaacatagtcattagagcctccaaggtcaacatgaaacaatattaatggcagctagagagaagtagcaggtcacctacaaaggaacccaatcaggctaacagcaaatctttcagcagaattctaagccagaaaagactgggggcctatattcaaaattcttaaagaaaataaagtccaacaaagaatttcatatctggccaagctaagctttatatataagtgaataagaaatgaaattcttttaagacaagcaaatgctaagggaatttgttaccaccaggtctgccttacaaaagatccttaagagagagtgaaacatggaaataaatgttcttttccaatcaccacaaaacacactcaagtacctagaccatggacactataaagcaatatttaatcaagtctacttaacaaccagctaacagcataattacagggtcaaatctgcacatgtcaatattaaccttgaatgtaaatgaattaaactccccatttaaaaggcaaagagtgacaggttgtgcaaagaagaagactcaactgtatgctgtcttcaagagacccttctcacatgcaagaacacccacaggctcaaaataaatggatggagacagaccaatcaagcaaacagaagaccaaaaagagcagggtttgctatttttactgcagacaaaattaactttaagccaataacaatcaaaaaagataaataagggcattacataataataatgtgttcaattcaactagaagatttaactattctacatctctatctatctatctatctatctatctatctatgtatctatctacacatctaacactggagcacccatatttataaaatagctcttacagacatacaaagagactcagataacatcacaaaagaagtgggagacttcaacaccccagtgacttttggacacataatcaagacagaatactaacaaagatatttgagacttgacatttcaccaaatggacataacagacatcgccataacactccacataacaaaaacaaaatattccctcttctcacattcacatggcacatgctataaaattgaccccatgcttggccaaaagcagttcttaacaaattaaaaagaaaaaatcataccaaccatactcttggaccacagcaaaacaagaatagaaaccaataccaattagatctctcaaaaccatacaattaaatggaaattaaacaatctgttcctgaatgacttttaagtaaacaaagaaattaaggcaaaaattaagaaattctgggaaactaataaaagcaaagaaacaatgtaccagaatctgtgagacataactaaagtaatgttaagaggaaagtttgtactgcaaaacacccacatcagaaacatctcaaattaataacatattataatatcacacccagagaaacttgaaaaaacaagagaaaatcaacctaaaattcacataagaaaagaaataggtcaggggtggtggctcaagcctgtaatcccagcactttgggaggccgaggtgggcagatcacctgaggtcgggagttccggaccagcctaatcaacatggagaaaccccgtttctactaaaagtacaaaactggccaggtgtggtggtgcatgcctgtaaccccagccactccggaggctggggcaggagaatcacttgaacctgggaggcagaggttgcggtgagctgagatggcaccaatgcactccagcctgggcaacaagagtgaaactccatctcaaaaaacaaaaacaaaccaacaaaaaagaaataacaaaagtcagagctgaaataaatgaaatggagatgaggaaaactatacaaaaaatcaatgaaacaaaaattgttttttctaagaataaagaagactgatagacttctagctagactaataaagggatcaagggagaaaatccaaaaacctacaatcagaaatgaacatggagacattactactgaccttacagaaatacaaaaaaaaaaaaaaaaaaaaaaaccctcagagactattatgaacaattctatgcacaaaaactagaaaatctagaagaaattgataaattcctgcaaaaatgccacttcccaagattgaactaagaagaaattgtaaccctgaacagaccaataatcagtttcaaaattgcaccagtagccaggcacagtggctcattctttaatctctgaactttgaagactgaggcaggtggatcacttgaggctaggagtttgagaccagcctggccagtatagcaaaaccctgtctctacagaaaatacaaaaattagccaggcatggtggcacatgcctgtgatcccagcaacttggtaagctgtggcacaagaatcacttgagcctgggacacagaagttgcagtgagccaagatcatgccactgcactccagcctgggcaacaaagtgatactctgtttcaaaaaacaataataattgaaataaataaaaatgataaaaaaatttgcaccagcaatataaaatctatcaaccataaaaagcccttgaacacacagatctacagtcaaattctaccatatatgtatagaagagctgggatgaatcctaccgaaactatttcaaaaaattctgaactcattctatgaggctaaaatcattctgataccaaacttctgcagagacacaatgcaaaaagcaaacttcaggccatgactccgaatatctggaacagctcagaaatctgggtgcagaaagctagggacaagcctagccagtcaagttgcctccagggcagatgccagaggcagattcactgggctgggagagtgcaagctgaatagaccccacaaccatctgctgagctgaaaaccctgggccatgggtgccttcccagttgcatatcattgggtatctctgccctgccagaaactcctccactccttgacccactgcaccagtagacataccctacaacccactcggactctctcaagcacagggaactggcaagcccctggggagttgtgaatctactggtgacccaacacttagctggtaccacccctaaggaaggagagagtgcatcctaccaaatctcccattggggcaaagaaaacacaggcatggcaccagtttttgaaggggatggcaccaagtcctgcgaatgaaattggagagggagtcatctcttgcccctgccttctttccctgctgcataagcactgaaaaagttgtgaacagcagagttaagagcttatctgctggcccttactctagtggactacatcctaagttataccaccaaacacaagtacattcctccaataggcaatgcctctgaaacccaccagagtaacgtatatacaacctaggaacccataagtacagagccttggccttctgaaagcactcagaaatgaagccaattgactatacactatattcaccagtcaaactctcaagtggagcaagaataaaaaaacaaaaaagtcccatccaaatgacagcaaactaaaaaaaaaagacagctctctcagatgagaaaaaattagcacaagaactctggcaatcaaaaatgtcagaatgttttgttacctccagaagatcacactgattccctagtaattaatcccagccagattgaaatgtctgaaattaaagacacataattcagaatgtgggtgtcaagaaagctcaaagagatttaagagaaagttgaaaccaatgcagggaagccagaaaaaaagatccaagatttgaaagacaacataagcatattaagaaagtaccaaattgaacttctggaattaaaaaattcactacaggagtgtcaaactacagtcggaatcttgaacaacagactagaccaagcagagaaaagaatttcagagctctaagacaggtccttcaaatcaacccagtcagacaaaagtaaagaaaaaagattaaaaattgaacaagaaaatccaagaaatatgggattatgtaaaatgaccgaacctactactcatgggcatttcggagagaaaagaagaaagtgtaagcaactggaaaacttatttgaagatgtaactcataaaaatattcccaatctcactagagaggtcaacatgcaaacacaaaaaattgagaaaacccctatgagatactatacaagatgatcatccccaaggcatatagttgtcagatgttctgaggtcaacacaaaagaaaacattttaaaggtagccagagagaagggtcatatcacctatgaaaggaaaccccatcaggttaacagtggacttctcagtagaaatgttgcaagccacaggattctattctattctattctattctattctattctattctattctactctattctattctaattttgagacagaatcttgctctgttgcccaggctggagggcagcggcacaatctcggctcactgcagcctcctcctcctcagttcaagtgattctccagcctcagccgcccgagtagctaggactacaggcacccgccaacacgcccagctaatttttgtttgtttagtagagatggggtttcaccatattagccaggctggtctcaaactcctgacttcaggtgatcaacccaccttggcctctcaaagtgctgggattacaggtgtaagccaccgtgcccagccaaaatttcatccctattattagcattcttaaagaaaacacattccaattaagaatttcacatttcactaatctaagcttcataagcaaaggagaaataaaatctttttcagacaagcaattgctaagggaatttgttaccactaggctggccttacaaaagatgcttaagaacattctaaacttggaaacaaaagaaagatacctgttactacaaaatacatgtaaataaatagcacacagaccctataaagcaaccacacaatcaagaccacaaagcaaacagccaataacaccatgacaggaaagaaaactcacatatcaatattaaccttgaatataatgatctaaatgcccccacttaaaaggcacagagtaccaagtttgattttaaaaaatccaaccttctaatgttttcaaaagatccatctcagatttaactacacacataaactgaaagtaaaaggatggaaagaaaactattatgcaaatggagaacaaaaaacaccagggcttacaattcttttatcagataaaagagactccaacaacagcaaaggagaaagcaggtcattagataattataaagggtttaattcaatcataagccttaactatcctaaatatatatgcactcaacattgaataacccagattcataaaacgaatacttctagaccaacgaaaagacccagagagccacacagtaatagtgagggatgtcagtatttcactgacagtgctatacagatcactacggcaaaaaaaacaaaaaccaaaaaacaaaacaaaacaaaaaaacctaacaaattctggacttaaatttgacactagacctagaccaatcagatataatagacatctacagaatacgtcatccaagaaccccacattatgtatttatctcattcacacatggaacatactccaagattgaccacatgcttggcaataagtcaagtctaaatgaattttttaaaaaatcaaaattatatcaagcatactattggaccccagtatattaaaagtagcaatcaataccaaaagaaactctcaaaatcacaaaattacatgaaatctaaacaacttgatcattattgaattttgggcaaacaatgaaattaaagcagaaatgaagacttttttgaagctaattagacacagcaaacctaaatctctgggaggcagctaaagcagtgttaagaggaaaatttatagtgctaaatccctttatgaaaaagttagaagatccccaataaacgacctaacagtgcaactgaaggaactagagaaaaaaaaatccaacccaaaagctagtagaagaaaagaaataactaaaataagaggagaatgaaatgagactgagatgcaaaaggccatacaaaagatcaatgaaaccaggagcttgcttttgaaaggaatagattggtacaccattagctagattaatcaagaaaaaaaaagaatcaaaataagcacaatcagaaataaaaaaggtgatattaaaactgatcccgcagaaatctgaaagatcctcagagactccaaaccaaatccagtagcaaattcaaaagttaattcaccataatcaagtaggctttattcctgggatacagggctggctcaacatatgcaaatcaataaataaaattcaccacataaacaggatgaaaactaaaaacatgattgtctcaatagattcagcaaaaacgtttgatggatttcagcttccttcatgatagaaaccctcaacaaagtaggcatcgaaggaatataactcaaaagaatcagaaccctctgtgacaaacctacagctaacattggaatgatgggtaaagctcaaaccattccccttgataactggaagaagacaagaattcagactctcccaactcctattaaacatagtactggaagtcttagctagagcaaacagcaagagaaataaataaaaggtgtccaaattggaagagaggaagtcaaattattccatttgctgatggctttctatcctgggttctctattctgttccactggtctttggtgtgatttattttggagaatatttcatgtgcagatgagaataatgtatatcctgccattgtgtaaaatgttctgaaaatgcctgttgggttgatttggtctgaagtctaatttaactgcaatgtttctgtgctgattttctgcctcagcattgtcaacagtgttaataccccattattattgctgtctatctgttctcttaggtctatcagtatttgttttatgaatatgggtgctccagcattgggtgcatatacatttagatagttatgtcttcttgttgaattgagccctttgttattatgtaataatcttctttttttaatgctgttgatttagtctgttttatttcatataagtttggctatttcagctcattttggttttccatttgtgtggtatatcttttcccactggttttctttgaggcttggctttttaccattaaagcgtgtctcttgtaggcagcaaatgtttggatcttacttttcttatttaatttgccagtctatatcttgtaagtggaatatttaggccaattacactcaggggtaatattgaaatgcaatgtttttattgctgtcataatgtttttacctggttgttttgtagcaacaattgtataattgctttatagactctgtgatctttttacttatgtgtgcttttatgatggcaaattttgtccttttatttctgtctttagaactcttttgagcatttcttgtaagtccagtcaagaggtgacaaattcccttagcatttgcttgtctgagaaatactttatttctccttcatttatgaagcttaatttagccaaagccaaaggttttggttggcagttctttgctttaagaagacagaaaatcgaagcctgatctcttctgggttgtacagtttttgccaagaagtccactgtcattctgatgagacagtctttataggtgctttgatacttctctctagctgatttcagcatttgttcctttatgttaactttggtttgtctgatgaatatatgccctggtgagatccatcttgcagaaaatctttcaggtgttatttgcacttcttatatctgaatgtctaattctgtatctagatcagaaaagtttcttgagttaactaatcagatacatttcccatgctttttactgtttcttcttctcactcagaaatgcccatagcttgtaggtttgattactttacataatcccacatttcttgagggctttttaaattttttatattctttttttcctaattttcttatgactgggttaattcaaaggactgggctttcaggtctgaaattctcccttctgcttgtctggtttattgttaaaatcttcaactacattttataattccttcaatgaatttttcacttccagaagttctgtttcttttttaaatatctctttagtaaattttgtattaatatccttaattgttattctgatttctttatgttggttttcaactttctcttggatctcattgagcttccttacaataaaaaaaatttgaatttttttttatgtgtcactttagttttatttgttagaatccattgcttcagaactgctgtgatcctttgtgggtgtcaaaacactctgtctttctgtactgctgaagttctcacattatttctcatttatagaagctgtcacttagttattttctatttgctttcatttgaagaacattttcaattttcaattcttttctcttttgggggtgtgattatatgttgtgtgtaatcatttggcttcaattctgggtgccttcagggggctaaggctctagatgagtttcttggttatagatagtttttgtgcagtggctttctcaaatgctgattgttgtaccaatatattgggcatataatttgactcactatcttttgcagggctgggagtgcagaagcctcaggaagattatctcattccctagtatcatgcccttctgccaacaggttttgtatatggttatgcagttcagtttacggtttagtagttggcacttactagcagacactggcttgttgttttgacaatttgatgactagcaaaagcccctcccctgaagggggtggtgggaaagctcactgtgggatgcacacaggtctctgccaagtggtagaggtgtgaagggtgttgcactagctcctcatcctagggatgtaacttacatccctatctactcctgttcaagggctcacaacctgcagttcagatagacaatgtcctttatctccacgctgcaatgcaactaggtttcgtagaaaacattcatcctgtggctacagctgaaagggcctctggaaaaaacctcttcccacagcttgaaatagacagctgtagctggtctatactctgtagctggttcattctatggtgcagaaatgctgctgctttgtatggggaggaagagataagtcccaccctttgagcaagtccaggttggtggggacactttcaactggggtgcagctgccctaagtgtactgaaaagcctgtttccaagtgcatccacacaaacccccagcagaaaacgtcatgattgtgtctgcagcagtgatggagacagcaaaagatgccttttccatttcagttcccagccaatggtaccacctgtcctttgggacaagacaatactcctaattttcaaagatcagcattgcacctgtgtctctgctaggagaaatacagccattttctggttataagtggggaggggggctctccatcagggaagaatgtgcattccagtttcctttgtcccaaaatgtgctctggtggactacaatcccccttccctagtgaaggcctgtatcaaaggctaggtctctaaggatcttgcagctccccaaggtcctgctggttctctgtggttgccgtaggcagaagaggttctgggaaatgtttgtgtgggatatagtcatgcagagagacacaagggctaaaattatctggaccgaatagaggccccaaacagatgtacagtctgtatggtgctcaccacctcagctcgggtttgagggggagagcaagcaaacctatgtgaactcaccacccagtgctctgccctccagatgttccccaatcactgccaacagtggtgcctgcgtttgcaagggcagaggggctctcagacaaattggtggcaatgagttgggtacaagagtgaggataaaaagacacactcccatctacactttccatgggactccaagttcctcatgggtcagtctctgccagacatttatgccctttttttttcctgtacccccaacttcttcctgtgggttctccaaaggtttccgacacttttccctcagcagtccacttgggccatgattattcacctgtaaggttaaatcttctttctaaggagaactggtatctgatgtctctagtaagccatcttgaaaaaaatcacgattttcattctttattctgttaatgtgatttatcacaattatttttatttagctttattgaggcaaagaaataagacaaataaaattgcgtatatttaaaatgtacaacatgatgatttgaagtaaatatatattgtgaactgactgctgcagtcaagttaattatcatattcactacttcaaggacttaatttttttctttcattttgatgagaatgcttaaggtctactcttagaaaatttcaaagtatataatttagtattattaactgtagtcaccatgctttacattatattctcagaacttacttatcttagaatggtaagtttgtatactttggcctacatctcccaatttgacccgcccctagaccttatcaactaccattctactttatttctaagaactcaattttattgttttatattccacagtcacttcttttgctttaaaatgaattatgtaaattacagcacagagaaaagaggcagaaagaaggctaaagggttttacactacttaatcttgggattggggtaaaaattatgacctgtgggtcaaatgcagtcctttacctgtttatgtaaataaagctttatcggaacacagctatactcattcatttacataatatctgtatctgttttcacacttcaacagcagaactgagtaagaagaaagactgtatagctcatataacctaaaatatttattatctgccctttgcagaaaagctttctgactagttgtaaattaaaaagagcatcttcatcataatctgaatgagctgaagtaacacaaaatcatcttcaccaatgttcttgagccagagtaagtggattgatatatttccatatcatatgtggtttgtattagtcaatattgtgttgctataaaggaatacttcggactgggtaatttattttatttttattgatttattgtttttccaagacagggtctcactatcaccactggtatacagtggcacaattttggctcacgtaactgccaccttccaggttcaagcgattctcccacctcagtctcccatttgctggaactacaggagcacgccaccatgtctggttaatttttgtatttttagtagaggcgggatttcacaatattggccaggctcaaactcctgacctcaagtgatctgcctgcctaggcctcccaaagtgctgggattacaggcatgagccaccaggctcagcccctatttttaaaataggttaatttacctcacagttctgcaggctatacaagcatagtgccactatctgctttaggccaggacctcaggaagctcccactcatggcagatggcaaaagggaacaggtttgtcacacggtaagagagggagccagagagatgccatgctcctttaagccaccagctctcatgtgaactaacagagcagggacttgctcattaccatagggaaggcagcaccgagccattcatgagggatccataccatcactcaaacaccttccaccaggcctcacccctctgacactggggatcacatttcaacatgagatctggaggagagaaatatcccaaccatatcaggttactcaaacattctgcttagaatttgtgcggccaaaactagttaccaactgtgtttgttaaataaaaaatggtattaaaaatttttgtgtataactaaaaaattatacagataggtatagagaaagagaaagggaagagggagagggagagggagagagagagagagagagagagagagagagagagagagagaggagctatccaatttgagtgtaaggaaatctaaaaaaaaataagaacttaaaatcctattactagaaactgctttttgaaacctagaaatattttattatatttttctttatatttaacagcatgggactgttagtaggacccctaccaaagacaatttacaacttcaagttttacccaccaatgatgtgacaaaagctttttgaatttaaactaagcagcacttctattaaacattgattttaataatataattgaagtgatatagcaaactaaaaatgtttttatttctaaagtaaatattttagtcaaagttgcatcaaaaatcaagcacttctgtgacatttttcaagactttaaccacaattatagttagtactacatagtacacattatttaaaatgtattataaaccttttctctttatatgaaatataaaatttaaaatgctgtaacatgattcatattgaaaaacatgtaaaattgtatacactgctctcatacagaaagtgccactggaatcacataaaactttctaatgctttaaggtgccaggcacagtgcttggcacatattacatacttcataaatgtttgttcactcattctctcatttactcatgtactcaaagaaatacgggcttaaggagaaactgcattataatgagaactgaaagcacaatcttttatcaacaaacttggagttttgacaaagactttgacagagagtggagcagatgagaggatgataatcaagatttcaaactccttggttaaaatctactaagtaaagccctgggttcacaagatgacatcatagagaatcagagtcaatactccacaaaaagaatgcattctttcaatacccaggttggacttttatatataaccatctgcttgaagctgggaataagtcgtgttagaagtaaaacacacagtccaccggcaggtaagaaccacctgatgggggacttgtttttctgcgctgagacttcttttcaggtagggtctcattctcttggttttgacaacttaatacaagttgaattaaaaaaaaaaactggcttaacccaaaaagttttattttaaaataaagataaataaatgtagaaggtagaggggtgtttaacattcctatttttttcctgttatgcacgaaccaatccatctattctgcatatttgtgccaaagtcacaatgtgaggtgtcaactttttgaggagcatttctgggctatttgcggaaggtctgataaatgcagtattttaccagagtaataaggtctacaaaatgcaaaaagctgtaaaaaagagaagaaagtatgggtactaagcagaatataagataaaaattgatcttggaggaaatttacctattttctgtttgccccaagaataccgtgctggcagcaagatgcactttattttttcctaaatgggaaacgggttaaaaatctgtaacaaaaataaaacataacactggcaagtcacttgcagctggcctgaattgtctttggtattcagagaagggaaaaaaaaaaaaaaaatggagggccgggcgcagtgtctcatgcccgtaatcccagcattctgggaggccgaggtaggcggatcacaaagtcaggagttcacgaccagcctgaccaacatggtgaaacactgtgtatactaaaaatacaaatattagccaggcatggcggcacacacctgtaatcccaggtactcaggaggctgaagcaggagaactgcttgaacccgggaggcggaggttgcagtgagccgagattgcgccactgcactccagcctgggtgacagagcgaaactctgtctcaaaaaaaaaaaaaaaaaaagtactgttgtaggtccagtcttgtcattccacagaaggtagggagcgtagggagaggtgtagaaaaccctctcaaattcttcgcttatgaactgactctgcttgaatacttctctaccttctcttaactccagtcatctgagtaatacaaagagagccgttggagatacaggttgtatctcctcatctcttgagaatttcctgggaaaccaagaaggcctctttactctgcattcttataaacaaattaagagtttggagacttcattgccatctgcacagcttctctgggtctttgccaattaaactttcttgccttttttttttttagtgattcctaagtgggcttgtgctatttttagcaaggcttttttgagaaccaagtactttcccttttctcttctaaagttatggtcatctacctttatcatttaaacaatttaaaggtttaagtagtaaaaaaattacaatctcaaaatatgtcctaaaatttgactctcttaaagactttattgtaactggctctacatccttattttctatgtttactaaaaacttttgtagtggttgtcatttatgcatcattggctgggctgtgagaactgtttaataatttgtggtctgagatgatcaaccttggaaaatatttaattgtattcattcattaaatcttttcccaacttaaatctaaaagctaagttgaaaagaaatgttatcaaatacggaaataagccttcagaattccaagttggatttcttgtatgaacttttttgtctcattaaactttgtttaatgagacaaaatctttaaattcagagtaaatatcatactagttatactgtttccaattttattaatgtcaatggacgatgtctaaattaaacaataaaaagtcccttcagtttatgtgacagaaaatgcgtgagcattagatatttatcttacaccatagttactgataattttttttgccaaaatataaagaattagtaatttctttaaaaagaaataacaatgcaaaacctactgatggtaagagaaaatccctgagatacttacttcaacacttttatcactgaaaacgattttgaagctattctaattattttgatttctataaagatcaatagaaaaaattttaaaaacataaaatatttgtgaatggcacactcacctgataagataataaaggatatcatcccagatagaatatttaagaaagttgcactgtgttttgtttttgctttaatgagttgtaaaagtaatttagcttatcaagacaaattcagagctacataatagtatcgtgaattttgccaagtcacataaataaagttgtgagttggatgactctcctaacgttattatgagatttaagtggataaaacttgctcggtagatttattagttcagaaaaataatctcctaccagcaaaaccaagaatttcttttagaacaggtttcaaggcaacaaactgtggcatttttccgcactttttgtcatgctaccaccactgactgaaccacctgaattaagtctcaaactcaggcttataggtagtggttatgacaaatagcagttttaatgatttcatatgaagacaaagacttaaagagtattttttgtgagatcatgcccctagaagaaactaaacttaaccatgaaatttaaatgaaatagattttatttaaaccgattaaacaggatttgaaatggttgccagtctggtcatccaatagggaacttgaaaattcagacatggattggcacttctgtttgttttttgagtcttcttgtcactgatgcagttatactatattttttctttatcttagttcattacattactaaaatggagaaaaatgagacaatgtggaatatttgacagttgctccactgtaggaatatataataggttccaaaggccattcttaactcctgcaatgtgctctatattcttggctttctcttaggaagtctagcctccagacttcagagctctacaaaccatatatatgtgtgtgtgtgtgtgtgtgtgtgtgtgtgtgtgtgtgtgtgtgtgtgtgtgtgtataaatatatgtaactctctctaaatataaaactctctatataactctctatatacatagagttatatagagttttatatagttatatatatatatatatacatatatttaaaatatatatggtttgtagagtacttggtggtgtaaaagtaattgcgatctttgctgtaacacacatcattcttatatgaccactatcatgttgacttagaggtctaggttttcagactacattctatagtggtccacgtaaaacaaaacaggtgagactggtcctggtcctcggaactgcttttatccaacagcagaattacctgaaagtgtggtgttggctaaatgtaacacaggcagagggtgagcctctgtattaaacacctagtagtctaaaggtaaaaggtcaccactggagaacagcacatacaaatattttaagtgtttcagcaagaaagacaccctgctctacatcaccatgtgtaggagtagagaaatgtacatctttgactccagaaaatccaccactgactcagcaatacttttcaatggccagtgctgttccctgccccactgcctgtattttggattgtgagagaatcaccgtaggtaccaacggtttcaattacttctggacacaggatataatacttttcagcctgacagccacaacctccactgcaccatcaaacttgactgactcaggacctagctttaatgcagtctgtcatatgactcatgacatgtatatgcaatttccaccccagctctaaataatgacagacttatctgttctggaaccatcttctcctagtgcaaacattaccccagcaaagcaggccagatgccccatcttgttttccaagtgcccactgatccattctttactaaagattaagacatccatgggagttcttgtttttttgcagcctcaagagcatcaccacacatctttctccattcatggtctgttttatctgacatcaaacgtgctctcagtaagtagtcataaaaactgtctcccgatcaccaaatgatgtgtgataccgaccccagcaccctgttcttgggtttaatttggataaagaccgtttggacaatccattttctgaagcagtttccgcatgtacatgaccttgttgtagtaaaccaggtcttctgtcaagtagctgaggtggatgaactccatgtgcagtgtaccagattcagccagaatgctgctacatgcaggcccctagcttcagctgcaccctactccactctgcaaatgtaccattgtccagggaatcccagtacatgtgtgaaaggcaggaaggaatttcttagccagttgcacagctttaatcttgaatatctcctttcctgaaaggtgatatgctgcaagtaggccttcaataaactgaatgttgacgtcaaacacaaacatctctgaattcacactgacctcaaggttgtctttaaacaatctttgcacatctaggaattcagcatgaagtcccaagatataaagggtatccaaagcatctacaacggtagcacccatttgtgaattttcaaatgttagtggcacatcctttccttttaataggtctgagttcattatgcccccaactgtatgtcctataattatcctaggcatgtttcatgctttaatttttttcccttttcttttttatgttgtcttccaggtctccaccattcatgcctacaaagtttggaataaggactggtggcagtggcttgttctctgtcttcatttcttggaccctatttttctctatctgaatttctgcttggatttccttgcttgacttttcttttctttcctttttttgagatgtggtctcactctgtcaccctggctgagtgttgcagtgccatcagggctcactgcagcctccacctcccaggctcaagcaatcctcccaccttagaccccagaatagctgggattacaaaagggcactaccaggcctggctggttgttgattttttgtggagacaaggtctcatcatgttgcccaggctggtctcaaactcctagatgaaagccatcctcctgacttggcctcccaaagtgttgggattacaggtgtgagccacagcacccaggctgcttgactttctcaatttttcttttgtctcttccagggacttgtcatgattagctcgaactttatttctcagaggttcttcttcttcttctctgtgtgtatgttaattgggtgcatagatcaggaagacttcagggtttttagcccctttgccagctactacatgaggaattaacacatcgtctaaacccagatcaaagcgtttgtgttttgagaagcctagaagaaaaaagaatgcccccaaacacagggtgatgaaggcattaaaaataagtgtcttctcagaaagtctcaaggtagtgctgtgatgtggggagggcggccccaggttcagaggtgggatcccacgtctggagagggcagcagggctggggtagtcatcgtttatgctcttgaagcttacagcaaatgcacgatacattgaactgtcttcaaaatcttggcaaaaatgggaaaactcaattttgctccacttgaaggactgctgcgcttcttcacaggcacctctttgacgctcctccaattccattcagaaacgtgagtgaccccccccccacccccttaaacgatcacaagcttatgtcctgcgagatctcgtttgccctttgactttcagggccctatcgggttatcagaagactcttcattcctaggggtagatcagagaagtcacactgcaaaggagctgccccttggggaggtgctcaagggtggtcttctgccccaaaagggagtctggctaactctgagaattgcagaaggttcaccatctctggtccttccattccagaatctcttaaccttagtggtggaaaaaataagggtctccaccgaaatctcaaaacagggaggaaggtttccggcctcccggaggccaaggcagaggcgctgggggaaggagcaagaagggaccagccgcccgcgcttcccgacgctgccaggcaggctcccgggacgggcagagctccgaggctgcctccgggcagtcacgtccaacgtacctgagcccggccagccgctgtcgctgtcgccgccgcactcgcctgtccggacgcaccttcctcctcctccgcggcccccgagaagctgggcgcgcaggcaagggaggcgcggcggcccctgcggctggtcagttcaccaggtgcctgctcccgagcgagttgccaccgaccccgccgcgcccggccgagccccgcgctccgcagcgtgggaaggagccgagcagagacccttgctccgagagcccggggtcggcgcctgctcattcctcgcgcagccgtggggcagcgggtggccccgggcgcgcgcgagcagcctcttctctggcacgcagaggccggctccgtgtcctcggccagccgccgtgggggcctcctccgcgctgcctcgcgtggtgcccggctcggcctagatgcggctgctgagagatggcgcccacgcgcggggctgcggcccagcctctgcctccccagtactggtgggcgccgaacagctgcggggcgacacgcgctgggcgcacgcacgtaggagccggagggtggggcagatggggcgcttccggaaccctccccgactcgcgagtgggcggcgccggcggcggagcgtggggcgcgctccctggagtccacagttaagtgacacaatcctgggtttacctttctctgtcgggatcatttttcttagcatgacgacctccaggtcagacacaaggtcacaggtggcggtttctgccttcctctggctgaatatatttcattaaatatatattccgcattttctgtatccagtcatccctctgtggactgataggttgtttctgtgtcttggctagtttaaataatggcgtaataaacataaagtgcagattatctctttaagataccgatttcctttccttcagacacatactcagaagtgagttgtatttttaactttttgaggaacctctgtatgttagttcatatgtctgcaccagtttacattcccaccaacagtgtacaaggacttccctttctctacatgctctgcaacagttgttctctcttgtgaggtgttggtgactatttttagtaatagccattgtaacagaagtgagatggtatctcattgtggttttgatttgaatttccctgatagtgatgtcaagcatctttgtgtatttatacctgttactgattttttaattttcttgaaaaaaatgcctattcggaagatatacctgtttttatttgggtgttttttgtttgtttgtttgtttgctattaggttgagtaccatatatattttgaatactaacctctcattagattatggtttgtaaatatttctcctattctgtgggttaccttttcatcttgttgattgcgtcctttgctgtgcagaagctttttagtttgatatcataccatttgtctattttttatttttttgcccgtgctttgtggtatatacaaaaaatctttgccaagacaaatgtcaaggagcctttccctgttttcttctaggagttttacagtttcagatcctacacttaaacctttaatccatttcaaattgatttttgtatatggcgtaaaataaacagtctaatttctttttcttcctcctaccttccttttttttccttttatttcttcttctctttttttattcttgcatgtgaatatccagttttccaaacatcgtttattgaagagactatcctttttccattgtgtctcctaggcaactttgtctaaaataaattgaccttaaatgtgtgggtttatttatgggctctttattctgttcgattgattgctatgtcttttcttatgtcagtatcatgctggtttgataaatatagcttaataatataatctaaaaacaggaagagtgttgcttccaactttgttctctctcaagagtgctttggctgtttagagctttttgtgtttccacacatattttagaattatttttatttattcaaaaaaaggtcattggaattttgataggaattatattgaatttgtatgttgctgtaggtagtatggcaattttaacaatattaatcatgaatgtgatacatattttatttttgtcttcagtatgtttcatcaatattttatagtgttgagtgtctagatccttcaaacccttggttaaatatcttcctaagtgtttttttttaaatactatttaaattggatagttttcttgactgcttttcaggtaggtcattatgatgtaaagaagtgcaactgatttttgtgttgatgttgtacctaaaactactgaatttattcattagttctaacatttttttggggaatttgttttctatgtataggatcttgctatttgcagggataattttactgcttgtcctctgatatggatgtcttttgtttctttctttttttttttctcttgcctaattgctctcgttactacttccagtaccatgctgaaaagaagtggtgacagcgggcattcttgtcttgttcctgaccttagaggaaaagttttagttttccctgattattatgttaactgtgagtttctcatagatggcctctactatattgaggaaattttcttctatttctaatttgccaggagtgttagattttttcaaatgtttttttctgtgtctattgagataaccatgtggtttttatctttcattcttttaatgtgctgtatcatttgactgatttgtctatgctgaaatttttgctataggaaatggaaagctatcaaaagattttcataaaggatattttggataagtcccctcagaccactgctaggcaatgggttctcaaaaactaaatatggagaaaagaaagtttgagatgttgctgtaggaatgatgttggcttgtaggagagcctatgggttgggagagaaagggatggatttaaaaattattggaatggtaacctagcctcaaggagagggggattctccgtgctcctttcttttctcatgtctttgatttttgccaccttgaaagttaatgtgattggttagatttcaggacagaataaaggaattatttctagagattaatattttaaagtattccaattacaccggagtcaggttttcccctctcctcctcctcctctctctcttccttttttcctttttctctttgtttcattgtttttattccttttctctatgcattaacaccaccaaagaggcttggagagttagtcttgttctcaccctcacactctgtgtcttacaattttttccctatggcactgttggaggtgcagacatgaggtcgattatattcaagaatcatgcttggggaagggaggagaaacaagataaaggggctttgactcaggactccttcagtccactatcacaagaaaaaggagatttccaaagtattcagaccagatctctagtttattcaaacctgagtcaaagcctcatctaataataaagttacttttctctgtctctttttttttacctttttgtacctacagctcctttaaattaattttatagagaaataattggtttaaaaataattggtttgaaaaataattcagatatttttgtgtcctttgaaacaatattaccttaagaacacctaaacattctttgcagcattgaattaaataatgcatgccttattcataacatgttataaaacagccatttaaataagatttatatgcattaaattgtaaaagggcccagcagatattgtcatttgactaaaaattgtaaagttaaagaaatataaacattataaaagtccacaaaccttcacaccaaactttgaatggtcaataatattcacttaggggtgaatccatcactggaaacagtgatggattgtgacaaagatcattttatatttcactttatggaattcttttgtttaagttattttgagatattgaaaaaatatttcatatataaaattttatgaggaatattaatatgattattattaatacaatgtaatagtaatattaatatatttctaatgtacaaatatgagaaatatattaatatattaatatatttctaatatacaaatatacaaatatattaatatattaatatatttctcatataaatgttaatattcacttttatgtataagaaatattttatatagatttatataaaatttatatatttatatgcatataaacgcatatatttataaatagtataaatatataaatttccatttttattttagattcagtgggtacatgtgcaggtttgctacaagggtaaactgtatgatgctaagggtttgacttctattgatccgatcatccagacagtgaacgtagtacccaataggaattcagttcttgtcctcattcctccctccctccttttggattctacagggtgtgttgttcccatctttatgtccatctgtatctaagatttggctcccacttataaatgagaacatgcaatgtttgatttttttttctgtgtcaatttgcttaagatactagcctccagcttcatccatattgctgcaaatgacattatttcattttttacagctgtgtagtatttcctgatgaatatgtaccacatttgtttatttcaatgagttttagggtacaggtagtttttgattacataggtaagttctttagtggtaatttttgaaattttagtgcacatgtcacctgatcagtgtacactctatccaatatgtagtcttttatccatcacctccctgtcaacattccccaccaagtccccaaatttcattatatcactctatgcctttgcatcctcatagcttaactcccacttatatgtgagaatatatgatatttggtttttcattcctgagttacttcatttggaataatggcctccagctccaactaagttgctgcaaaagacattattttgtttctttttatgactgagtagtatttcatgctctctctctctatatatatatatatatacacacacacatatatgtatatgcacgtatatacatatatacatatatatacagtcatatacatatatgtatatgcacgtatatacatatataccgtcatatacatatatacttgcatatacatgtatgtgtgtatgtgtgtgtgtgtgtgtatatatatatatatacacataccacattttctttatctactcattgataagtgaacacttaggttggttctatatctttgcaattgtggatattgatctttcctgcacagactaaagaacacagctgcaaatgcaatgatgcacaaaggagccatgcatctgagtaagaacctgtctactgcccatggctctcaagtgccaaataatgcaaaatagcccaaacgacaacaccaaaaataactttactaattatcaccttctgtaaaccaaaatcaggaattcaacaacaaacattctgtatgcagccttatccctctgaaattttccaggagtgaagtaaactgactatactaaacttagaccacagttaaagtaatactggctctcctagatgagaaagaataagcacaagaactctggcagtttaaaaagaaaaaaaaactgtctttttacctcagacaagcccactaactccccagcaatgcttcttaaccaatcaattgtctgaagtgacagacatggaattcagaatctggataacaagagagctccttgagatcaaggaaaaagttgaaactcagttcaaggaagacaagcaattcagtaaattgataaagagctaaaagacaaaatagcccttttaaaagagacccaaactgaacttcttgaggtgaaaaattaactacaagaattttataatacagttggaagtattaacagtggaattgatcatgctgagaaaagaatctcagagcttgaagaccagttcttcaaattaactcagtcagacaaaaataaagaagaattgagaaaaatgaacaaagttttcaagaactataggattatgtaaagagaccaaatctatgactcactggcattcctgagagaggagagagaataagcaacttggaaaatgtgtttgaggttatagttcatgaacattttccctaatcttgctagagaggttgacatgcaaattcgagaaatatagagaagctccaccacatactataaaagatgaccatctccaaggcacatagtcattagattcatcaagttcaatgaaaaaaaaacaaaaacaaactcaaaaagccaaaaatgtaaaagcagctagagggaagcggcaggggcaattcccgatcaggctagcatcagaccaatcagaagaaaccttgtaaaccagaagagattgaggatctatttccagtatacttaaaaaaaaaaaaaaattccaaccaagaatttcatatcctgacaagctaagcttcataaatgacagagaaataagatcttcctcagacaagcaaatgttgagggaatatatttcaactagactagccttacaaggggttcttaacagaagtgttaaacatagattagaaagaacaatacctactaccacaaaagcacacttaagtgcacagctacaggcactataaaacaactacacaatcaagtctacaccacaaccagctaacaacaacatcacagcatcaaaatcatacacctcaagactaaatttgaatatacatgggctgaacaccccatttaaaagacatagagtggcagcctgaataaaaagatgagatctaaccatctgttgtcttcaaaagacccatttcacatgcaataacacctacaggctcaaagtaaaatggtagagtaagaactaccctgcaaacagaaaacaaaaaagagccagatttctattcttgtgtcagataaaatagactttaaatcaataaaaattgagaaggacagtgaatggcattacacaatgataacaataaatgtattcaacattggagcacccagattcacaaaacaacttcctcttggcctatgaacagacttagactaccacgcaataatagtggagacttcaacaccccattgacagtgttagccagatcatataagtaaaaaactaacaaagaatctctggaattaagattgacagttgacaaattggacttcatagacatccacagaacactccactcaacaaccacagaattattctcatctgcacacgcagtgtattctaagttctcccacatgctcagtcataaagcaagcttcaataaattttaaagaaattgaaattataccaagcataacctctaatcacagtgcaataagaatagaaatggaaaccaaaagatctctccaatctacacaaatacatggaaattaaacagcttacttcaagtagctcctgggtggacactgaaattaaggcagaaataaaattctttgaaattagtaaaaatgggacacaactttccaaaatctctgatatacagccaaagctgtgttaagaggaaagtacccttcaatgccttcaacaaaaagtcagaaagatttgaaattaataagctaactttgtacttaaaggaactaggaaagaagaacaaacaactccaaagctagcagaagaaaagaaataatgaaaatctgaaaacaccttgagaccagaaaatccatacaaaggctcaacaaaaccaaaagctggttgtttgaaaggataaatgagattgatagactataagctagattaagaaaaaaaagagaggggattcaaataaacacaatacaccatcagaaatgacacaggtaacattacaaccgatccaaaagagatgcagaacatcatcaaagactgtgatgaacccctttgtgttcataacacacaaactagaaaatctaaaagaaatggataatccctggaaatgcccaacttcccaagactaagtcaggaagaaatagaaatcccaaatatactaatatcaagttttgaaattaaatcagtaataaataacataccaaccaaaatagccctggatcaagtggattcacagctgaattctaccagatataggaagaagaactgacatcagtcctactgaaatgatttcaaaaaaaatcaaggaggatggactttttctgtgaagccagcatcagcctgataccaatatctggcagagacccaatgaaaaaagaaaacttcagaccaatatagattatgaacatagacacaaaaatcctcaatgaaatactaacaaatctaatccagcagaatagcaaaaagttaatacaccatgatcaagtaagctttattcctgaaatgtatggctggcttaacatatgcaaattgataaatgtgattaaccacataaaaaaataaaaagcaaaaaccatatggctatctcaatagatgcataaaaacttttgataaaatccaacatccctttatgataaaaccctcaacaaagtagtcattgaaagaacacacctcaaaataataagagccatttatgacaaacacacagccaacattttactgaatgagctcgaaccactcactttgagaactggaaaaagacaaagatgcccactttcaccactcctattcaacatagtactagaagttcttgccagggcagtcaggcaagagaaagaaacaaaagacacccaaataagaaaagaataagtcaaatcgtctatcttcactgatattatcattctgcacttagaaaatcctaaagactcttccaaaaggctcctagaactgataaataactttagtaaagtttcaggatacaaaaatcaatgtacaaagaatttgtatataccaaaaatgtccaggctgagagtcaaatcaagaacacaaccccacttagacaatagccagacacacacacacaaatgctcaggaatatagctagccaagtagatgaaagatcgctataaggagaaatacagaacactgctgaaagaaatcagagatgacaaaaataaatggaaaagcattccatgctcatggataaaaagaatcaatataaaactggccatattgcccaaggcaatttacagattcaaatgctgtttctatcaaactaccaatgtcattctttacagaattagaaaaagtactattctaaaattcagatagaaccaaaaaagagccccaagaaccaaagcaatcccaagcaaaaagaacaaagcatcacactactcaacttcaaactctactataaagccatcataaccaaagcagcttgatactgctacaaaaacagacgcatagaccaatgtaacagaatagaaaactcagaaataaaaacacacagctagaaaccatctaatattcaaaaaggccaacaaaagcaagcaatgaagaaagggccccctatccaataaatgatgctggataactgactagccatatgcaaaagattgatggtggactcctaccattcaccatgtacaaaaattaactcagaatggattaaagatttaaatgtaagacctcaagttttaaaagtcctggaaaaaaacctaggaaatactcttctttatttgaccttggcagaaaattgtttgactaagtccccaaaagcaattgcaacaaaaccaaaaatagacaagtgggacctaattaaactaaagagcttctgcacagcaaaagaaaatataaacagagcgaacagacagcctacacaatgggagaagatatcctcaaattatgcatctaacaaaggcctaatttccagaatttatagggaacttaaatcaacaagcaaaaattaattccattaaaaagtgggcaaaggacatgagcctatacttttgaaaagacacgagtgtccaaaaaacatgaaaacatgctcggcgttactaataatcagagaaatgaaaatccaaaccacaattagataccgtctcataccagtcaaaatggctatttataaaatgtcaaaaaacaacatatactggcaaggctttagagaaaaggaaatgcttatacactgttgctgtgaatgtaaattaatccagctactctggaaagcagtctggagatttctcaagtaacttataacatagctaccatttgacctggaaatctcatgattgggtttatattcaaaagaaaataaattattccaccaaaaaggcacatgtacttgtatgtccatcgctatgctatttgcaattgcgaagacatggagtcaactcaggtgcccattaattttaagttggataaggaaaatatgatacatattctctatggaatactatgtagacataaaaactgagatcatatcctttaaagcaacatagatggagctggagatcataatcttaaacaaattaacacagaaacagaaaaccaaatactacatgttgtcacttataagtgggagctaaccctatagcacacacagacatcaatatggggacaattgacactgtggactactagagggtggaggaagtgggggtgggttaaaaaactacctattgggtactatgctcactacctgggtgatgagatccacactccaaaccacagcattactcaatattcccacgtaacacacttgcacatttgccctttgtatctaaaagtttaaatgtaaaaaagacaaatataagcatgctttcttttttatttttaaagatttagtgggtagaagtgcagatttcttacatgcatatattggatagtgatggagtctgggctttagtgtacccatcacctgaatactggacattgtatctgttaggtaacttctcagcttttgcccacctctcatcttcctgccttccgtagtctccagtgtctgttattccactctatgtgtctatgtgtgcccttcacttagcttccacttataagtaagaacatgcatattttattttctgtttctgagttattttacttgggatatatagcctccagtgccattcatgttgctgcagaagacatgaattcattcttatttatgactgagtactattgtatggtgtgcgtgtgtgtgaatatatgtgtgtgtgtgtatgtatatacatatatgtgcgctgtgaccatacatacacatacatatatgtatatatacatgcatatatgtatacattcacacatatatacctatgtacatatacacacctatatacatgtgtgtacatacacatatacatgtatataggtgtgtgtatatacatacacacacacccaatctgattatttttcagcagtgttttgtatttctccttgtagagatctttcatctactaggctagctgtattcctgggcatttttctggaagtgtatatatatgtatatatgtatatgtatgtatatacatatatatgtgtatatgtatatgtatgtatatacatatatatgtgtatatgtatatgtatgtatatacatatatatgtgtatatgtatatgtatgtatatacatatatatgtgtatatgtatatgtatgtatatacatatatatgtgtatatgtatatgtatgtatatacatatatatgtgtatatgtatatgtatgtatatacatatatatgtgtatatgtatatgtatgtatatacatatatatgtgtatatgtatatgtatgtatatacatatatatgtgtatatgtatatgtatgtatatacatatatatgtgtatatgtatatgtatgtatatacatatatatgtgtatatgtatatgtatgtatatacatatatatgtgtatatgtatatgtatgtatatacatatatatgtgtatatgtatatgtatgtatatacatatatatgtgtatatgtatatgtatgtatatacatatatatgtgtatatgtatatgtatgtatatacatatatagtgtatatgtatatgtatgtatatacatatatagtgtatatgtatgtatatacatatatagtgtatatgtatgtatatacatatatagtgtatatgtatgtatatacatatatagtgtatatgtatatgtatgtatatacatatatagtgtatatgtatatgtatgtatatacatatgtatgtgtatatgtatatgtatgtacatatgtatgtgtatatgtatatgtatgtatatacatatatgtacacattcacacatatatacatacatatatttacactcacaccaatatacatgtatgtgtgtatatacacatatgcatatatgtatatatacacatatgtatataggtgtgtgtgtgtatatatacatatatacatgtatacccactctgataatttttcagcagttttgcatttctccttgtagagatctttcgtctactaggctagctgtagtcctgggcatacacatgtaaacacacacaacatgtacacattttctttattcaatcatcttttgatcaacacttagattaatttcacatctttgctattgagaatagtgctgtgataaatgtacaagtgtaggtatcttttagatataatgatttatcttttaatctgattgtagttttatttttagtttatttagtttattgagaaatctccatactgttttcagcaaagtttgtactaatttataatccagtgagtgatgtataaggattcccttttctccacattgtcattagcatctattggctttttaataatagctattttaactggtgtagatggtatctcatagtgattttaatttgcatttttcagatgattagtgatgttaagtattttttcatatgtctgttggccacttgtatgttttcttttgaaaaatagctgtttctttctaccggaggtacaaggaggaactggtaccattccttctgaaactattccaatcaatagaaaaagagggaatcctgcctaactcattttatgaggccagcatcatcctgataccaaagccgggcacagacacaaccaaaaaagagaattttagaccaatatccttgatgaacattgatgcaaaaatcctcaataaaatactggcaaaccgaatccagcagcacatcaaaaagcttatccaccatgatcaagtgggcttcatccctgggatgcaaggctggttcaatatacgcaaatcaataaatgtaatccagcatataaacagagccaaagacaaaaaccacatgattagctcaatagatgcagaaaaggcctttgacaaaattcaacaacgcttcatgctaaaaactctcaataaattaggtatcgatgggacatatctcaaaataataagagctatctatgacaaacccacagccaatatcatactgaatgggcaaaaactggaagcattccctttgaaaactggcacaagacagggatgccctctctcaccactcctattcaacacagtgttggaagttctggccagggcaattaggcaggagaaggaaataaagggtattcaattaggaaaagaggaagtcaaattgtccctgtttgcagacgacatgattgtatatctagaaaaccccattgtctcagcccaaaatctccttaagctgataagcaactccagcaaagtctcaggatacaaaatcaatgtacaaaaatcacaagcattcttatacaccaataacagacaaacagagagccaaatcatgagtgaactcccattcacaattgcttcaaagagaataaaatacttagcaatccaacttaaaagggacgtgaaggacctcttcaaggagaactacaaaccactgctcaatgaaataaaagaggatacaaacaaatggaagaacattccatgctcatgggtaggaagaatcaatatcgtgaaaatggccatactgcccaaggtaatttatagattcaatgccatccccatcaagctaccaatgcctttcttcacagaattggaaaaaactactttaaagttcatatggaaccaaaaaagagcccgcatcgccaagtcaatcctaagccaaaagaacaaagctggaggcatcacgctgcctgacttcaaactatactacaagggtacagtaaccaaaacagcatggtactggtaccaaaacagagatatagatcaatggaacagaacagagccctcagaaataacgccgcatatctacaactatctgatctttgacaaacctgagaaaaacaagcaatggggaaaggattccctatttaataaatggtgctgggaaaactggctagccatatgtagaaagctgaaactggatcccttccttacaccttatacaaaaattaattcaagatggattaaagacttaaacgttagacctaaaaccataaaaaccccagaagaaaacctaggcattaccattcaggacataggcatgggcaaggacttcatgtctaaaacaccaaaagcaatggcaacaaaagccaaaattgacaaatgggatctaattaaactaaagagcttctgcccagcaaaagaatctaccatcagagtgaacaggcaacatacacaatgggagaaaattttcacaacctactcatctgacaaagggctaatatccagaatctacaatgaattcaaacaaatttacaagaaaaaaacaaacaaccccatcaaaaagtgggcgaaggacatgaacagacacttctcaaaagaagacatttatgcagccaaaaaacacatgaaaaaatgctcatcatcactggccatcagagaaatgcgaatcaaaaccacaatgagataccatctcacaccagttagaatggcaatcattaaaaagtcaggaaacaacaggtgctggagaggatgtggagaaataggaacacttttacactgttggtgggactgtaaactagttcaaccattgtggaagacagtgtggtgattcctccaggatctagaactagaaataccatttgacccagccatcccattactgggtatgtacccaaaggattatatatcatgctgctataaagacacatgcacacgtgtgtttattgcggcactattcacaatagcaaaggcttggaaccaacccaaatgtccatcaatgatagactggattaagaaaatgtggcacatatacaccatggaatactgtgcagccataaaaaaaggatgagttcatgtcctttgtagggacatggatgaagctggaaaccatcattctgagcaaactatcgcaaggacagaaatccaagcacctcatgttctcactcataggtggcagttgaacaatgagaacacttggacacagggtggggaacatcacacactggggcctgtcatggggtggggggaggagggagggatagcattaggagatatacccaatgtaaatgacgagttaatgggtgcagcacaccaacatggcacatgtatacatatgtaacaaacctgcatgttgtgcacaggcacactagaacttaaagtataataataataataattaaaaaagtggtaaaaaactaaaaactaaaaaataaataaataaaataagttattagaagaaaaaagcaaaaaaaaaaaaaaacagccctagctgatggtaattttctttatagtatttctgttttcaatttcatttatttctattaaaatatttattatgttttaatttttttcttcatatttaatttaatattccctttctagtttattaaggtgggagcttagattattggttgtatatcttatttttaatgtatgcaatcaatgctataaattttcctctaagcactgctttgctgcatcccacacatttgataagttgtgctttttgtttcattagaaatatttttaaatttttcttgagatttcttctttgacctattagttataagggtgttgtttattatctaagtatttcgaagtcttcttgctatctttttgttattaatttctactgtaattccattgttgtctgcaagtatacattgtatgattttcatttttttatatttgttaatgtgtgttttatggctcagaatgttgtctatattggtaactcttccacgtgagcttgatcagaatgtgttggataaagtagtctatgaatgttcatgatgtttagtggatagatgatgctgtttcactatgcacttgatggttttcttttttctatatctgtctatatctgatgtgagtgttaaagacttcaactaaaaaaatggattaatctagtctccttgaaacactgagtttttacctcttgcattttgatactctgttctttaggtgcacacacatgaagaatcctcatgtctattcagagaattgacccctttatcattgtgtaattgtccttatctttggtaatttccttgcactgaagtctgctctgtctgaaattaataccactactcccaccttttttttttttttgagacggagtttcgctgttgttacctgggttgaaatgcagtggcgtgatcttggttcattgcaacctctgcctttggtttcaagcgattctcctgtctcagcctcccgagtagctgggattacaggcgcctgccaccacacccggctaatttttcatttttttagtagagacggggtttcaccatgttggccaggatggtctcgctctcttgacctcgtgatctgtccgccttggcctcccaaagtgctgggattacaggcatgagctaccatgcctggccattaaatttagaattaagaccagaaatcaggacaaatgtccactaattaaagctcagatggagcattcagataaggcattatgacaagttagggcacagatgataagagattttgatctaattattctcagaatcttctgtcacagatataaaataattataacctacggaagacatgaagacacattcctgcccccacatccaataagtagggtcataactatttcattacccttcccctctgtttccacccataactccaattcccagaaataaagtagaaaataagaaaaaaacaggtttgggggatttggaaacaggaaggttagaaccatggatgtaaagaaggacgctggagagactgaactggaaaataccgtggaaataatgcagtctaggcttagagtgtgttttctctttctagcaataaaaaccacacttctggtggctcacgcctgtaatcccagccctctgggaggccagggagggtggatcacctaagatcaggagttcgagaggagcctggccagtatagtgaaaccccatttctactaaaaatacagaaattagccaggtgtggtggcacacaacctgtagtcccagctactcgggaggctgaggcaggagaattgcttgaacccgggaggcagaggttgcagtaagccgagatcatgccacagcactccatcctaggtgacagagcaagattctgtcttaaataaataaataaataacataaccaataaccacaattttagtgaagatcatgcccattattataaattttcctttaaagcaagaaaatgtatacctattagaggatttaaattgctagaaaaatacctagagattacacacattaacccagttattcttgtcataaaacacttaaaaagtgatcacatttgtttatcactccagagtaagttttggaaaatacttgagagcagaggcaatgcccaaatctccctggccaaggtaaaagctcttctaggcaattttttattcgagtaggaaataaaaactgtgttgctagtttatttagaaagtgacaaaaatgtaagcactatgcatataattctatgtattatagggaattagttacatagctaggacttttctcaagggaaaactcttggcatatttttaacatttaataattatatgaatatagatgaaatattttaaaatattaacaaatagaacatcagtatattaaaagagtggcatgttattctccaaatcagaaccattttataatagtaatacaataaatactacttattatgctaaatttttttcttacatatgctggacacttgtatatgtacctcacttgtattaatccatttaaaatttaaaagattggccagacacagtggcttacacctgtaatcccagaactttgggaagcggaggcaagaggatcacttgaggccaggagtttgagaccagccgtttgagaccagcctgggcactatagcaagatcctgtctctcaaaattttttttttttaaaagaaaaaaattttaatgtaaaagattcctaagtggagttgatgttatctctaatgaacaatgaaatgaacagagatataagagatacagataattttaataacttgtccacaggtgcacagtccaggaacatcagtaatctaataaacattatataaagtcaatagctgcccaaaaagctcttaacaaaactttggcaactattctcagtgcactttatgagatcactgttagaggggcacttttatagaaaacactgtaagctcatacccaacactccgtgtgttttctataccttccacttccccttagtccaggcaatgcgattaagtagaagtaatttttaaaaatcccttccagatttggcccttaaaataatctacacataggattctctaacttctctaacttcttcactgcctgataacctttgagaagttgtgttccaggtgatgtagctacatgatggtgaggagctgcgggactgaccttggactgtttttgagtgggtttattgtgttaaaccactgaaattacagaagcttttcttttttttctttttttttttttgagacggagtctcgctctgttgcccaggctggagtgcagtggtgcgatctcggctcactgcaacctctgcctcccagattcaagcaattctctgcctcagcctcccgagcagctgggattacaggcacccgccatcacgcccaactaacttttgtatttttagtagaggcagggtttcaccatcttggccaggctggtcttgaattcctgaccttgtgatccaccctcctcggcctcccaaagtgctgggattacaggcgtgagccaccgcgtccagcctcaaaagcctttttatttcagcagttagaggtaatttcttggacaaatacagtgaaaaactacatcaataaaacaaatataagaaaaaattatgactatctcaaactaatattcagtagcattattaatgagaatcacaagatatattacttgaccggcagtaacaaaacagaaatgccagctatttttcagaatacaaagtaaaataaacagaaacatctctaaagatttcttttgcaatagtaataactattcaggaaatataaaggaagaagaatcccaatgtattaacagtaacatgcatatagaatatttagaaataagctaacaaaaatgttcatgttgaagatggaaaataatatgacaagatgttactatgctgaatataggtgaaagtgggaagaaagaggtgtactatattagtcagggtcccagaggaaaacaggtgtctacgctaatcggataattaagaatttaatgaaaagactaattaaagtatgggaaagtaaggggcacaaacacaagtgtaagaaacagtgatgcactctgggacttgcaacaccaggaagctgttaccagctctaggcctgaggagcatgggaaaaacaaacaaacaaaaaacaaaaaaaaaaacaatttacaaaacaaggggggcactgagaaaagtggctaacaaaacaacctgttatctcaggggttcaagaccaccctggccaacatggcgaaaccccatctctactaaaaatacaaaaattagccgggtgcagtggcttgcacctgtaatcccagctactccggaagctgagtcaggagaattgcttgaacccaggagacggtggttgcagtgaaccaagattgcgccattgcacttcagcctgggcaacagagcaagactacatctcaaaaaaaaaaaaaggccattatcaggaaagctgggatataaatctcacttccctcccacctcccagtccttgtcagacctgtacatgggctgcacctaattgagagttggagggcaagggaactcgtgagtatattaataaaaactagcttcctggacatatagcagaatgcaaaagggtaaaaaataaatctgggtgggtaaatgtgatggaatactatactgtttccctaaattggaagttgaatgaaaaaaatgtcagtagtcccaccatcatttatagatttaatatgattccttttataatactaataagaattggggacacattatgaaataatccttaagttcatctggaaaaataaagaggttaaaaatgataataataaaacaaaagactggcaataatgggggaattatttttacatatacatacatataataataaaagtcatttgtacaagtttatacacatacatgtaaattaataggatcaaatgaatgacttcatctccaacacaatcatttgcatgcatggataactacatttgtgtgtatgaaacaagagctaacctagagacacctgggaaggctagacacttgtcagattgtttttcagacctacatacttagtctgtttctgttgctctaacagaatgttacacactgagtagtatttaaatatatatatatatatatatatttaatatatattaatataaatatatatatttgtagttctagaagctgggaagtccaaggtcgaaggtccacatctggtgagggccttcttacagcatcataacatagtggaaggcatcacattttcagagggcaagagcaggcaggctagttcagctctctctctctcccttttttttttttttttttttttttttgagatggagtctctctgtctcccaggctggactgcagtggcacaatctttgctcacttcaacctccacatcccaggctcaagtgattctcctacctcagcctcctgagtacttgggattacaggtgtgtgccaccacatccagctaagttttgtatttttagtagagatggggttttgccacattggccaggctgatctcaaactcctgacctcaggtgatctgcccaccttggcctcccacagtgctcagattacaggcatgtgtcaccatgcccagtccctctctcctcttcttataaagccactatgccatcatgagggcccccacacacatgaccttaattctaattacctccaaaagcccccacctccaaataccattaacatacgcatttggggattaagtttccagcacatgaactttgggaggacacattcaaaccatagcattctgcctctggccccaaaatccatgtctttctcacatgcagaatacattcatttcataccaatagccccaaagtcttaactcattccagcaccaactcaaaagtccaaagtctcacctaaatcatgaatgagtgagactgaaagcacaatttattctgagatgaatttccttcagctgcgagcctgggaagtcaaacaaattatgctcaaaatacattagtgggacaggcatgggatagaaatttccattccaaaagggagtaataagaagaaatgagtaacaggctccaagtaagtccaaaacccaacagggtgaacaacattaaatctcataccacttcctggttggagtggggatgggcccccactgcctcaggcagccctgcccctgggactttgctgggttcagcccatgcttccgctttcccagggtggatttacatgctggtagctctatacttcttaggtcctggtggtggtcccactccaatggctccatttggcatttccctggtaggaactcagcatggcagctctgcccctgcagcaggtttctgcctgggcctgaatgctttctatgacaggttttggaatctagatggaggaaactgtgcctccgtagctcttgcattctgcactcctgcagtattagctccacatggacactgctaaggcttatggcttaggccttctgcaatggtggtctgaactgcaactggggctgcctgagccacagctggggctaaaaagtgctgcaccagaatgcagtgagcagagctctgaggtggcacagggcagtgagacatggagggatcccctggccagacccgcaaaaccattttgccctcctagagctctgggcctgtgaggggccatatcgatgatctcagaaatgccttcaggactgtttcccctttttctcaatgattagcacctggtcccttctattcctgctcatctctagtgaccagtcactcagccacacccttgctgtgttctccctaacttgtttttctgttcttcacattgccaaactgtgaattttccaaatttttatacttggcttccattttaattattattctgcttgaaatcatctctttgctcccatatctcactgtaagcattcaagaacagccatgcagtatccagaacactttgtggcttagatttttttttttttttggcccagctcaccactcttaggttccaccttccataatgtcctaggacatggacataatgcagccaagttctttcctgctttataacaaggatgacctttatttctatctgagaccttgttagaatggcctttcctgtacacatttctactagcattctggtcatgactacttaagtgctctctaataagttcctgactttccctcattttcttgtctcttatgaatcttcacaagaattacccctaatcctctgcttctgccactatgcaacacgcttttctgagcctgttgcttcacattcttccattttctacccattacccaataccaaactacctccaaatattcaggaatttttatagtgacaatcccacatctcagtaccaattttctgtctcagtccattttctgttgctataactgaatagcacagattgggtagtttatttttaaaaatagatgtttatttagctcatagtcttgttgtcaccaagttcaaaagcatggcaccagcacctggcaagggcctctgtgctgcaccatactatagcatgaggtgttctcatggtaggcaggcatgggtgcatctgctcatgactttattcctcttcttataaagccaccagtctcatcatggggtctcagcctaatgaccttatgttatcctaattgctgcccaaaggccccatttagtcccacctcttaatagtatcacaaagacaactgaattccaacatgagttttggagaaggcactcaaaccatagcagtactcatacactcataccctttcatcatatgtaagaatattgcaattatttcatctttaaatctgattgtggggaagatctatttctgacacatggaaaatccatgtcccagtctctaagataagaaccaagtcccagggattttcttttaagtcagcgtctctgctcatattataatttcattcagtggatatgtattcctaaatctactttcaatttaactgatattcccccaagatggattcagataaaaagctgggccttatgggacaggattccttcatgaattcagcactaattttctcctcctgtcacatcttctgcagatatacggagagagctttaatatagcatcctccatgctgccatctggggaaattcttaatcaacacaccctcccagacaaatgggccatcaagtgtttcacagatggatgggacagtcaggccgccccgaattagtgggcttggcttatctggtttttttctctattatttctgttcccctttttgcagtctctttgctgtaattgaattatgcttataactcacgtcttttatgagcatagctcaaacacaccttactggggacaaagctgctagtactcagcatgaataggtgttttgaagccaaagaagcacgcatttctgtccttaaaaattcttacagtgctattctgatggggagacagtctgaaatatatataggtaggccagatttcaagagaggagatagagtaatttggaaacttaagcattttggtgcctctctaaaagggacaaggatgccattctacacaactctggagagcatggcgacatttcattctttgcccctagcaaacttagaacatggcgccctggagaggctcacattcacttagaaaaaaatacaatagtgagcatacttttaaactgctctttttataagactcaacatatactcagaaaaattccagttgggatctgtggaagagaaaaagtttctgcaaaattggagaaaatgtgtagcacagtattgtcactatgtgtgtgcaagtgaaatgtaagtgctttagtaaagttcttaagctcaccctcctctatgtctaccttcaggactcagccatctctgagcataaacacatgaaaatatatgctaactcgtatgaaattcaatatgaatatttgagagctttctggggctgggtgtggtggctcatgcctgtaatcccattactttgagaggcagagacagaagaatggcttgaggccaggtattccagaccagcctgggcaacatagcaaggtcttgtctctactaaaaataaaattaaaaataaaattacctataattggtggcttgtgcctcaagtcccagctgcttgggaggctaatgtgagagaatcacctgagcaaaggagctcaaggctgtattaagctatgattgtgccactgtattccagcctgggtgttttcaaaaaataaaaatagaaaagagttttctgggaaggaagagatcctaaatgaagccatcagaaacaactagtttgactcagctgcaaagggtttgctaacgcaagtgagaaataattctgaatacagaatgaagtccaactcctgggaaattctttggattctagcaagaggacaagagacacaagtaaacagaggtcaatgccatgaggatcatgtgagatacaggcacgcaagcaggattaagatggggctagagaggaccgcaaagaagatgaatccatccatttcttcacacaccacccccaagactgggctgcatcagggacccagcctcctagtgatgcagttgggaagagaccacagtgcctactgaaactgcagtaaccgttagtgagagaaggaagaagcaggcaagagaatgttggtgtattcaaaatagacaacctgtcaaaactccaaggactatgacgggaacttttcaaggagctgggccatgtgagcatgtggctacctgagctaggaagtccatgctattactgtcattgtgacccagtctgtaccaactagctggtctgaccatgcaagcacaggggatatactacacaaagcattcctctttttattgagcctcaaaagaaactggaaactggtgtctagatctcaatggtgtggagatgagagccagatgagtccatgtctcccatcccttagccagcactgtccatcttggaatgttaagctgcaagggcaaatgatatcttactgtggtcttctgacccagtattccacaccacatttaaatattgtcagtgccactattgatttaggcatgcaaaaatgagatccttcaattacagagaacaaacgtgctgtatataatgcatttcagagatatttattgcaattctcatagcaggatcctgatggagaacaaagaaattaaagctcagagctacttgagcactcttctcttaagaaacaggggatctcctacttcctgatgtcacttgttctctcttcagcttcttgaccactgcatagcctaatctggttgcctgacacttgttagattcagagcttcctgctagccactgtgcaaaaagagaggaacaatccacaccaagacaagaaaaccttgcttaggaggagaatggaatgattgcaaacactatgagaataaagactacacctgttatatttgttgaagtattcccaccatatggtccagtgctgaaacatggcaggcactcaatgagtttttagtttttcactcaaaattaaattaaaataatgagatgacctttatatcagaggtgaaaggcttagtgagtggaaaggagggagaaactaactgtctaggttgtgtgcattgatggagagtggaagacactggcaactgagttgcagacctgggctggagcaagttgtcctgactcctaaccagttgtccattcccatgcactgcaccaccctgactatgaacttgggtatggagggcatgggtagtggtggctcccctcaggtatctccaggccctctgccctctgtgctggcagtcctgactgtgaactcaggcatggagggtgtgggtaatggtggctcccctctgggtatctcaaggctctctgccctccatgctggcagtatttgccagtgcaggtgagggcatggtgaatgaagcccctcatatcagagtttgacttcagatggtagattttgtgtgagtgatgcagcaggcacacattttactcattttaattttttcaagctttactgaggcataattcataaatataaattatatatatttaatgtgtacagagggatgttttgatatatgtatatactgtgaaatgattactgccatcaagctaattaacataaccatcaccacatagttaccgtgtgtgtgtgtgtgtatgtgtgtgtgtgtgtgtgtgtggtgagatcacaagatctaccctcttagcaaatttccaggatgcaatacactattatacattatagtcaccaagctagctatacataagacctccagaatgtattcatctcatagctgaaagtatgtacccttccacccaaatcccccaatttccctcacccccagtccctgtcaacctattttctactctgttcctatgagttggacttctttagattttacatataaatgagatcatgcagtatttgtctttctggggaagaggttttaaaaccaacaacctgttccagtgactcccctcctttgagtgtgatggtgacaccttgcgtcagtgacagtcctcacagggaggctgaggctgggccagctggaaagtgatggtcagtgaggcactgcgtgggactccctgaaactgatacaacagtttcatacagtttcagcagtacatgcacacctggagttgccaccagattctcttcctgaactgtgggctccttgtgggggtggatggtgaagtctcctggtcattaagcccctgcagccccagggcaagctcccctctgggtgaggatggagactcaagactcagtagggcagaaatacatctccattcctgggttcctgcagctagctttccctcctggaaatgagtttgggcttcaccagttcactctttggccagccaggttcccttgatatctaacacattctcatcacaatgactgaggtgacagtgggacttaatgttttcatcttccgtgcccttgtgactgacagtcataaaaatgttcattcaaagaaactagccatgtcctgtgcctgaccaaccatgaggccttccaagccccacccaggcatcactgactccttccagcttcctttgctccccaggctgagttcagcctctgcctgtcctgtattgcagagcaccttgtcatccctccttcatgtagcctaggtctacctgttgggggctagaattttctggtccttattatctttcttcttggtcttaatcctatgaccaaggtgaaaaaagcagtaggagaagttgaaaattgagtacattgaagccttgaccagctggtaaacagattctatcttccttgatgcagaatcaataacctacaactttagctgaatttctcaggacagccttctctgggacccatctctgtcccctaaaaatttcagaatgttctatcttctagcccaactgaacctgtgtgtgtgctttgcagctgtgagggccattgccatgagcacctacctgtgaagtaggcgtaatgctgttccttccatcctcatggccccagaatgttttcccattgggctgagttgagcccagttgagtggaaccacttcttctattcaagcatcttggaatagaggtctgaggaatccagactctccttacttggctctgggctgcctcctcagagctattagccaaattaatggcacatctataactggcacagcagcttgtgtctgggttctggtatatttatctggtaaatgttctgtaaaatcatattatgaaattaaaacaagatcttaataaatcacagtgtatgagatttaccaacaggattaagaagacatttctggaggcaggaattgtgcttgtttcccaaaggtatgccttgcttggtactgctaaatgctgcactggggtccctggagtggccgagagccctgtggctctatagctcagcaagggtgtcctggagttgatccaagttgtgaaatgttccttacatctccttgattgtcaagctctcactcctctccacagctcagcaagggtgtcctggggttgatccaagttgtgaaatgttccttacatccccttggttgtcaggctgtcactcctctctgaaatacatccagctcttgaccacttctccacctggtgctcatgctttagttcaggtcctcaaaatggatgattccagcagcctctttactcatcacctatcacaacatcacacgggctctgatttatcacacactcagccctgtcatgatgtgcttccccaaagtgcaccccagcacccccaagccagacaccttccaatcagcctcctacccccacactcacctccatatttctctctgttgctagagtacgtgaggcacatcagaggtcgcccttgtccttaggctgtggattggatttaactaactgggagtttgagagatgcaaggagaccagaatgagaaaggaggatgaattcagtatttattttgccactgcttttctgtgaggccatctcagcctggttgtttccctccaacaaaggtcaaagctcctcttaaagaggcctgctctccatgattctgtccttctgatgctagaaataactttctccccaaatccctttgggcctgatacggtcactagaaccatgttactgccctacttatgggcttgctgaacactccttgttaaaaagtgataaaagaaaaacttcagctaaattaaatttaaaagagtttaattgagcaatgaacaactcatgaatcaggcagcctcctgagccagagtaggctctgacactccagagcaaccacatggtggaagattaatgggcagcaaaggaaagtgatgtagagaaaatagaagtgaggtacagagacatttgggttggttacaggtgtttgctttatttgaacacagtttgaacactcagcagtgtatgagtggttgaagtatggctgcttggattggctgagactcagctattgttacaggtacatactcctaaattaggttttcaatctcatctacctactaagttaggttgtggttagtccacagggactcaaatacagaagtagggagtccttctcaggccacatttagttcgctttcactataatagtccgtttattgaattgtccctttcttattctaattagagttgaccatccttttcctgaccagccttcaactagcacacttatctttctaaaaccattcagggtttcacattaaactcacaaacatttttctcaaagagcagagccagtccagggagactccccaggaagggagcctcactcttttggttcctgcaaattttctgccatagctctttgttggttgaacccaactagatgttggaaaacaggggtttgtgaatgtcatagacacaacatccttcctcctggagcaggggcagggagaagagtggagagggggcatgggggtgggaatgaaaggtagcacagaatggttcctgacagaggcttcaacctctgggtgatgctgaggaatcccctctgggtgtgtcacatacagctgcagggggaggacacgtctagcaagaggaagacatctgggatgccggacttggagcagttatgctcatgatgcagggaagattcgcagagattccatattcggtgggaggggttccttgagatctgagagaggaggacaggtaggttcggagggagaaaccgcggctcacactttcatcaactcgtgagctctcagtgcctgaaggcagagcacgtcttccccattagtcatcagcattcagaagcagaaaatcagagctcgcctccctcctaggtgtgtgatcagctgccagaccctgagaggagtgtttcctacccaggccttttctccacagatgtgcctccttccttctccttaccttccgtctgtctctctttccctttctcttactatgtttctttgttttcattcttcccctgctcagtgtgactgttgcgatagtgatctctcccaaacacaggtcacttgggccccttcccacctctatcttcactccattctgcagagcaattccttccaaagcatcaagcatgttcaaatgcaaattgcacatcctaagaactcccttttgttcctaaggaatgagcccaacaccccggggagaccctgaaggcccttctctccctggctccagtccttctttctaatctcctccccacccccatatctccctgtgcacattacacacacccaagcagcttgtaggccctagggacgccctgtgtttccaccccaaatgctttcaccaggagattccttccatagaacgtctcttcccatttttcctcctagcccaaccaccatttcctctatgtaattttcacttcacttctttaccggtgttttcccagcatttcatattaatcattttctcctccataatttataatgtcttctgtattctctttattggtcaggagtgacaccatctttacaggactctaaggggaaagtgaaaacagaaaactgcctttgcctggtctctcctcctccctcataactaatcagccatccagatctcactgatttagcctctaaagatttctcaaatctattcctctctcccttcctaccgccattgccctacttcagatgcttgtcatttctctcccagaacatcgcaacagccttaaaattggcttccatgcctccggtctttctcctcttcaatgtattttccattctgcagtcactctgtactcttccaatctgtctaaaacacacatctgaccttgtccctccccagcttaaaacaccttcaactgaggaatacagtctaagttccctggcccagatatggccagagccccattctccagcctcatggttgacacctgtgcttccactgctccctcctgagcacgtggtgtccagtgcagcccaggacatacctctcccatctgtcctcttggtatatgaggtccctgtgcaggaaatgcctctcactctccaacacacacacacacacacactcaacacatgttcattcacacacagtcttgttggcttggtgaactccttctcggccttcaaaactcacttccattcttgctccacagtctactcctaactggccgtctgtagcatagggatctccaaactacagccccccggtcaaatctaggctaactgcttgttgtttttgtaaataaaattttactgaagccaggcacagcgcctcatccctgtaatcccagctttttgggaggccaaggcaggaggatcatttgagcccaggagtttgagactggcctgggcaaaagaacaagatccatttctacaaaaaaaaaaaaaagaaagaaagaaagaaaagaattagctgggcatgttggtgtgcacctgtagtcccagctactcgggaggcagaggccagaggatcacttgagctcagaagttcgaggctgcagtgagctatgatcacaccatttcactccagccttggtgacagaatgattctgtctcttaaaaaagaaagttttattgaaacacagcatgactttcattggtatattatctgcagctgcttttgcactacccttgcagagtggaaaagtcgagacagagaccataaatatttattctacagctgtttaaggaaacttctctttatataaatatatttaacctttatatatatatatatacacacacacacacacacacacacacatatatacacatatatatacacacatgtatatttgaatatttgaagaaatctgagaaatataattttgagtgaaaagcaaatttcacagtgatagtcacagcacgcacacagcttctgcacatgtgaaagcatacacaaatcagcacttgtaaataaaaacatacatataatacaaaaatttacaaatagactgaaagatacacattaaatacatggcaattattttctctgaagagaagaaaggaaaaaatttaggcttgttgccaaagggctttagctttatttttaatctatttattttaaaaagactggatgtaaatatgacaacctattaaaaactgatcatttggggcaggcacggtggctcatgcctgtaatcccagcactttgggaggccgaggtgggcagatcacgaggtcaggagttcaagaccagcctgcccaatatggtgaaaccccctctctactaaaaaatataaaaattagccgggcgtggtggcacatgcctgtagtcccagctactcggcacactgaggcagaagaattgcttaactcgggaggtggaggttgcagtgagccaagatcatgccactgcactccatcctgggcgacagagtgagactccgtctcaaaaacaacaacaacaacaaaaaactgattatttgggatagtgaaaataagggcacttattgttttagttttttgctttcatattttcagagttctcaacataaaaacaaacctttcttcagatatcacccccgttcagcccttctccactccttaatttccacatggagatactggcccctctcccacactttccttcattccttccacacactgaagtgtgatatgatcaaggcagttgtcaacattgtcacttgtatgattgtctttctcattggaatgaatgtgagctcactgaggacaagtacgattttgaatttatgccctagtgcgtgtccgaatatgtttgagatgagtttacctctcttatgcctgcaacaaaattttattttgtttaaagggtagttatttttttcttacatctccctaattagccaagagctccttggggccagggatatgttcttactgtcctctcagtccctgtggcccggcatccagctatcactcaaggaaggtggaaatgcgggatcaggacccagggcttggctccagacagcccatctccagtagaggcacaagcagtgggcccagctttaacttccgtaactgcccaggatgagaacagacagggagcaaactgagtaatggactaaaaagcaaggaacttggagagaaggttagaggagatcagattgtttacccaaagcagagactcaaaggcaagtgcacaaatctctgccacatgcccttaatttgtctactgctctctggccactgtctctgttttttgtttttttttttactggttccctctccatacatgaccatgaaccactagcataaggaggtgactgtcaaagtgtggtctcagatcagcagcagcagggtcacccgggagcttgtcagaaacgcaaatgctggggccgaccccagaaaccctgctacacagtttggtccccagccttccccctctatggcctaccttcacctctcaccttgggcaaatccacagtctcccaaataatccattactgtccggcactgagatctgtaaattcagggctctagcacagactcacccttgaactccggtcatgcctgagcaaccctctgcccccacttagcatctctgcttagagctcctgaaggccctgctgactaccacgtcctgggtgtgaactacccccaaatctggccctcgatccagctgcgtaacattgtcttccatctatataacttatctggaaagctctactattttctcaccctgttcccttccttaatccaccaccaatccccggatattttacattctacgtgtctgttacatccacccacccctgtgataaccatggcacttctgtctcagggatatttaaacatgaaaagggatcctgtttttccacttaacatggcactaccagaccttgcacagcctgaccatgctcctctgacctcaccgggcgacagcctctcccttgctctttgaggcccaggaacactgctcagcttctcaaacaggccatgcttgtgggcgtcacgaggcctctatgcgtgcagccccttcccttggcactgtctttttaccccagcccaccttcacctatatttattcctacttgcctttcgtagctcagttgtaggatcctcttgggggagactttctgtctgggcatatactttttgtttgttagttttctatagctgcaaaacaagttaccacaaacttagagacttagagcgagacccatttactggctcactcttatcttagggtaagagtttgggcaccgcatggttgggtcctctgcttcggggtctcacaaggctaaaatcaaggtgccagctgggtgctcctttctggagactctgggaaggaattcacttccaaactccttcagattgttggccaaattcagttccttgtgattattttttcttgtgagctgtcagccaggggcgctctctgctcctagaggccatctctattctttcctaccttgtccccttcatcttccaatccaggaacaaacaatctccctcacatcaaattccacccaagctttacatctccatctccagggagaatcctggttttttttttaagtgttgcctggttagaacaggtccactgaggataattcttgtatcttaagatcaactgatttttgggaacttaattacatctgtaaaatctgtgacaccaacacatagattcttgtttgactgaataacatggagaaggtgtatacatgagaaggggatcttggtggccacccgagaattctgctgatcacacagtcttctgacgtttgattcacagcagtctcctccaccacctttctaactttatctccactgagcacccttcgcccacactgggctggaggtttctgtctctgtgcctttgctcacgctggcgcctctctctggaatgccctcctctgtcatctttgcttaacaccaccccagtccctcctgtcccctcttctctgtgtccctgtagcactcgtcacatctaggacaaagcactagcaccgtccagcatggagtcactgctgctgagctcattagccctggtcagcctggcagcaggtggaggacaggaagtggtgctcattcctcgtggcctgagcccacggcacccaggccatggtggggtgcaggttagatgctccatacgttacagagtgaactgaaggaagtgaaacctggagacctgcagagtgactgctgagaggaggatgagaggagaaaagggagagggaagtggaggataattacaggagaaggctcgggacctcccctactatctgcacatggctttcgctccactcacaaaaggtcagtaaagccggtgccactggaagtcttggataagctacctagggtggggctgaggggctgcttttagagtgggggccccattctccatgtcacactcattgaccctcacaaaggatcaggcagtctgcagaacagacacaagtttggattttaaaaatatttatgcacaataaggttcaaacttttaaagctgatatatatagtttagctaaagttcaagtagctatgcagagaaagaaaggacatgatccatgtcccagaaattatccaagaaaatgtgagtggtggtttacatgtttggatttggggagagatcgtttgggttcaggatgggcagggcagtgccttttctctgggagcctgcctggtgaccctgaggacaggaccatctagaatgctaagagaaaccctcctcataccagtggggatctgaggtctcacagaacatgaagaccatggtggcagaggctgggcaagctcctaggctgggacttgtccacacatcccctgataggagcatcatcacaaagcaaagcagctgcacccacaataagtagtccccaggcatttgtcctgctttcctttgcttgtgtggttgcaggagatatgcagactgcactttcagggaagagggtgaggttgaagggaagagcagtgctggggtgaaaagagcaccagacagggaggaggcaagctgaggtccagccctcccagtcctgactaagtaactcaaggtgagcagctaataaaatagtgcagccagcgttagaaaaaaaccagacatcttattgtgtgaaattatttctattatcatagactagaatccataagctttaaaatttttaattgccaaaaaattctaatggaaaaggtatagaaatgctgaaatgtctacttttgactgtcatttaccacttcagcatggcgatggcaatggctttcgtgtatttagtccctcaactcactgtgcagttgctttgcagaggcagcagtcatcctgccagctcttggccttccctgccacccagcagagtgcctgctgcccagtcgggtcatctggcagccacagcagaactcgctactcttggaaaattgcttcccatactctaatgtgccctgttggcatctgtggagacctggaccccaaaaaactgttcaagactgaccataaaagatttagagctggagatattactttgaaaatacttcctaatatataaattatccggaaacgggctccatgcctgctcattagggcaatgttttaacttggcttccatcctagagtattatcggtccccacaattaaactaaaatataagtgaggctttcatggggtgggaaagaagggagtttgaaatatcaattggttcaggatgcctatgaatatatattttccagtggtggtgcttgactctcaaagccaggtcctggcagctgagcctggccaatagcattggctttgttctgcgatggcagtggtgagactggtaggattctttatttcttttatagaaaatcaaggtaatgattagagcagtcactggagtgactgaatgcttctttgtgctgggaactatactaaattatttaaagggattaactttttcagctgtcgaaatgaacatatgaaatgggtcttattaacagacccagaaactgaggcaaaaagctaaagacatttcctttagtccagggccacaaaccagcagctcagagggaatttggacatagacttttcttttttctttggccaaaatagaaataacaacgtgtgtgtgtgtgtgtgtgtgtgtgtgtgtgtttgtgtgtatgtgtgtttgtctgtgtgtgtgtgtatttttctatctttatctctatttctatctctttcaatgtctttgggcagggcataaaatgcccaatttgccacagaccccaccagtccctaatgtctttcaccttgcactctacacatatttattctacccgtttgccccttgaagacactgagttgttaacttcgcgtggaccagtcaacagagctagacttggtcaacagggtggggcggtgtcttggggaaacaacagtaccctaaattcagttcttctacaggaggggctcacctagctcctctgtctttcttatctcttttctagtcctgtcactgaagccacctcagaccttttcagagctttgtttttggaaagtgtctcctgttgggctctccagaagcaggtgctgagatagaggggtgaggggcacgagttgtacggagatcaacagctaacaggactgggagaaagcaggattgggaagaggaggtgaccgagtagtcaaggggagctgggcccagggagtcctggccaggggggagcagcaggtggaggacctggagtcctaagtccagcttcagactaaagaggtcaggcctttttaaccaggccctgctaagtccctgctaggtgatatttagaaagtgtgcaccagacaggcccagaagccagaggctgtccgctaaccatactccagtagctgggcaagtcccccccgaagggcccctgggcagccgtctccacgtcaaccacagaaggcatttccaactccaactccagttggtgttaaggtcagatctcctctctggtgtggcctatctgccggagcaggtggactctctctgggtctgtgtgtcctgggcggagccacctgggatccaaagcacaactaggagaatctggaagggggagggaggactgaccccacatttgcatgacaagaagctctaatgtcaaccttcctcaaggccatctttctgtgcctcaaagaaccctttgtctaaacctaatcacctcccaaaggccccatctgtaaatgccatcacattgtgggtaaggacttccacagatgaatttgggggaacacagtttagtccataggaacccttactatgaaaggcatcagagagtaaagacatctcttaggctgtctctaggcagacaaagatgactgagcacacccattttctaccttccaaactgtaccatttgttttccttatggtcctgtagagtgaggtgaccagtagtattttggtttgatttcttagaaaaagctcaaaccaaaatgaatttcctaacattttcacctaaaagctgtaagcccaggctcagcagggatgtgttttcactctcaggagaaagatgttagggatctagcacaactttcttcctccccaaattctctttcagacactctgggagaacttgagcaagggtgagggcctcgccagcacccagccatgcacccatgggcaccctggccctcaggccgccagcctccagaacagtgagaaaatagaaaagggatttctgttgtttcagccaaaaaacataccttgcatgcacattagttttctattcgagagccctgatatccccctcggggtttctatgtgagcacttgaccatgtgtgagtaggaggggtccttgctcagtgcccaggtgttgcgctgtaccccatgggttccagtggggatggcactgtgtctgaggggctaaagaagagacctaagacagcaaccaagacacagggtttattgaggcgacttgcatagagggtagtccagtagccgcaggctggacaggagaaccactacagtttgtaacaagcatgccattcatatagcatttcacgtagcaccctacacttaacccaaaacaaagggcctcgactccccgtacagactgggttccaagggatgggccaggggttcagatgtccttcatggataaggagtggatttctttctttcttttttttttttgagaaagagtctcgctctgtcacctaggctggagtgcagtggcacaatctcgactcactgcaacctctgcctcctgggttcaagcaattctcctgcctcagcctccctagtagctgggatagacacacatcaccatgaccagctaatttttgtatttttagtagaggcagggttttgccatgttggcctggctggtcttgaactcctgacctcaagtgatctgcccacctcagcctcccaaagtgctgggattataggcgtgagccactgcgcctggccaggagtggatttctgagtggaactcagattcgttagctcggggctctgaacacacattcttcttagaccatagggtcattcttggggtcggcttcagttatggctgtcagggggctctgccacacccaggggctgttcgatgctgcagagtgaaaggcagtagctgcagttgggaacctccctcccctccatcccctaccctgtgtcactgacgaagacgatgccactgaccacatcccgcatagggggaaggctttctgggaatgtcactcctccttgacaaggagcagggggctcccgccatgtcttgggtgtatgttcctgaacattgggatgatgggcaatcttgggctgcactttttccaactctgctcctggacccgccctcgtgctgtgggtcccatccccaggccctaagcagctgcttaaatggagctgcagaagagccaaagcttccatcactctcaccctctcttagcttcagtcttgactccttctctgagcccctgtacccatcttgtgctgcctacgtcctaccttgggctgctcggtattggctggcacaggagacccagagctccgtgacatcagggacggggctggctctgtggaatgatagctgccaacccagcctggtgcctgtgttgtgcaggatgcaagagccgcaagcatatgtgctgccactcggggcacctatgtaagggcaaggacaggacaggctctgggggctgcaggtgatgttcccagtgaagaaaatgttgtggcataatgttgtccctggtcatttctggggacccacagaactacctattctgtgtatatgatgtctcacttcattatgcaggaattttggccactatgaatgagctatgaggaaaccaggtggcatttgtagcatttcagagccattctctagtgcactagttctattagatagtctacaaatcagcggggagggcactggaagggtgagtttttaatacatttgaaaatatttcatagtctttttcctctttgaaattcttacagtaaataaaacaagtttaactcagagcttcataaatgtaagtggccatgaaactctcccttttgtgggacaacctcctgccactgacaccccctttcacgggggaggtggcctgcagtccccagagcctgccctgtgatgtccatcagaagtacctgggaagggtagtttgagaagcatcagtctgactttctctttagaaaatcaagcccattccacagatatagtcagatatctgtgatgttatcaactggcctgccttccaattcagtgtgataaacacttattaagcccccactgggtatgaaatactgagacaggtggagtgcgaaagacagataaagaatgcttctatgaagcttagagcctatgacatgacagaagataagttaggaagaagaatggctctacaacaaggtaaattgcttttcttattgattaaggtaagtgttataaaatagacagaatgtcatgggagtcaaagttaaaagagaaaaaatctgtatccagctgggacaaccagagaaggccactatcctgaggtcctgaaagatctttccgcctgcctgcctgaggtcttggcttgggtatctcaaaccaaattcaagagcctgaccctataaacccggtgcttctcccctgttctctctctcagaagggtaccagccacctgctgcataggcagacaccctgaagtcttccttgtctgaccctgcccggccatagagaaatgtattcatggtgtttttgtctttctctccagcacttgtgtcagcctgtggtgtcaaacctatgcatgtgttcatttaatgagtgtctacctcccccactctttgggagcaccccaagaacacacatgtaatgttcctgctcatcagtgtagtctcagaactgggttaattcctggcaccgaggagtctccaaataagtgacgctgaataaatgcctgaaggaacaaataaacaagcgtgtggactgatttcagaactcacccttgattgagagttacagtgtgtagaaatggaggaaaagcattttcagggtggaaggaatcagaggagcaaagtcactgatggcagcatggatccttgatagaatcctggaatggaaacaagacactggcgaaaaaactggtgagatctaaataaagtctgtagtttaggggagagtgacgtgctaatgttaatttctcagttttggcagatgtgccctgggaatttaagatgtcaacattatggaaagctgctgaggggtagatggggactctctgtaccatctttgcaaagcttctgctgtaatctaaaatttttataaaattgaacatttattttaaaaaaattaactttctttttgccccagaggaaacagagaccatcccagtcaaattaaagaaagtcttggtagttatgaccaatatcagagctttggtcctggagtccttggaattaataaaaggaacacacttaagggtgtttttctaaaaacaaaacaaaacgaaacaaaaaacggggtgagattcatggtgggccacagcagaatgctgggggtgttcagggcatgtctctgacaggtgaggcacagaccagcagagctccttttctcctccccaaacttttcctgctgttcccttgccagatactggcttgaggaaactgactcggaggtccttttcagttgaaggctagctcaaacctccagactcctgccctgggaccctgtcctgccaaaatccccttagatccctgtcactagctctgcatgccagtcccacagctctgttctttgctggtccttctttgggggtcggccctaagatgctaaagtggccctgcccatgggaaatgcaggatggctcacagccagtgactggctggtgtgaggctgcaccacacagctccccgctaggctcaggacagactctgaggtcgactcatgctccagtgctccctgtggggtctgcctatgtctggggcttctcctgaaatcacactcttgcttggcttccttctttctgttttctgtcctgcttcttccacacccttggtggtggtgtgtgtgtgtgtgtgtatgtgtgcatgcacagacatttttcagaatttccgtaatcagtccttgctttaaaatctaattctaaaaaatccagaacccagacactaagaattggttttagcatcacaagacctgccctcaaaatctagctgtaatacccaccagctgtgtgaccttggagaccatctccccgcccctcttacctataaagtgaagataatcacatctgcttcttggctgatcgtggtgcttacacaggttaactggtgtcaagtacctggcacctttcctcagtccctgagtgcacagttcctgagcatcctgggcccctcttccatgtgaaggctgtgcccatggacctcagataaactccctgtgtgtctcagtcaatagaggatattagcaaatgcttagccaagtgttctggctgcgtttactcccacatccaccaacataaaaagtaaacagcagaataaattgcccatctgctgccatcaatcacaaatacaatcttcgcccactgtaacacaaggcaaatacagtaatgacaaaatccatagctggggaaatgatagagtggtggccaggattttcctctctccacagccccagtccatgttctattatttaaatgcacagggagcaaccacggcgatcaatatgttgcctgccttcgctgtcacaaggcaggctggttgctcgggcctcgaacttagggcctctggatggcatgcttcaggcagctcagttctaggtcagtggaccctgagaggaagaaaagcaaagcccccagtcctcagagatggaagaagtcaccagaaggaacaagacaagaatatgtcacaatggttcagtacctgcacatctatagagtaagtttaaaataaacgtttctggtttcaaaagagataagaatgttcacaaatatggaaaaacccaaggaagaaaatcttaaaaatgtatgattttacctctccccaaatagtcactgttaaaatattgctctatatccttttagacattttctcatcctggtaggcatatgcacacatatatacaaagttgaggtaatgataggtgtccaactgtgctcttcctactctctctgtttggttcactgcagcctctgcctctgggttcaagcgattctcctgcctcagcctcctgagtaggtgggattacaggtgtgcaccaccatgcctggctaatttttgtatttttagtagatacggggtttcacagtgttgatcaggctggtctcgagctcctgacctcgtgatccgcccgccttggcctcccaaagtgctggaattacaggcatgagccaccatgcctggccggttctatcttttaaaaaagcctgctagtttaatagataaaaataatacttcattattctaccttgtgttaagtaattttactaacaatataatcttagtttgtttgctattggctctgtttgacagatgaaaaaaattaagttcagagagaataagttgtcagccagcatcacagaatttctggcaagacggcgcctgtgagggtgaagtgtgcgcttcccggctctaaaatccctgttatgtcagaataattgttaataaaattctttatgaaattgccacatcatggcatttacacatcacacatttgagtttaatgaaagagatttgagcaatgagtttgacaaaaggggaatgtaaatctggccacaagaatatgtctcttttgttcttagtgaaacccttggttgttcaaggaggggcaggccgtgtacatgtgtgcacatgtggatgtgcacacatgcatatatgtgactgtgtgttttagggggtgctggtgtgagctcagagcacaagaaggggtcctgccttttcccactgctcactggtgtttttttgcataattataaaacagagcctgccatgtcacatagggaccgctgctggagcaaccaatatccctgggattgatggcattcattctacagacatttcttaaacagatgtgcttgtcattgaatgaaactatgaacacaataggaatagtctcttccctcactgggcttctgtctagttgaacaaagcagaaagaccagccactgatagatcacgactcatgtacaaccttgggtaatcagtaaaagatcactgatgtggacagatatttacatggaccaaacgcaagtaagccaaacaactatcttaaagtgggtgtctgggcctcattagcatgctgaaactaatcaaatgagtgagaaaataatatatctcctgggttgaattcagcaaggtcttctagggtcaattacaagtacaattagcaaataaactcatagattatttcctgtttacacttcaaacaaacctgactttgctgatttacacggcaggttgcaccttgattataaattattaagtggtcaataatgaatggcattactgttttaatttccccaagtatgtttgaatatcacagcaaagagatgagatcagtcaacacatttgcatatcgtccagaaagacataaagcagaattaaccgtactttggaaatagatggctgaagagaaagctcacccctgagtttacattgcaatcctgataaatctctccccagtaacgctggcaatgaactctgagaggaaggagagatcgggtttgttaaattgcattgagtctccagctctcagatatggatgagtaacaaaagttccatgtatgattcttatcatgtgtgggtcattacagccatccattcacagatgtaagagctgtgctgggaatctggtgtatgacactgaaatccctccagtcagttctcatggagagctggtttcttattgaagatcagcagatcccgaagacactgtggagcctcctggagattcagactcaaggcttctgcccactcacatgtcctcctgctctcccttcagccccctcattccttggaagctcactcccctcctcccacatcccgtctgtccctccatgctgccccagagcactctctgaacaggtgcaccctgctggagtctgagcactgacccagcaaggcaagggctcctcggagagacacaaacggactgagtgaggctggcaggaagccctttcaccccccaattattctggtgcttgctgtttctatcaaagtagctacactgaggaaagagacttgccctgtgtgtgcactccgggggacaggcaggccactgtcacatgcccccatgcttgccctgggcttgttgtgtgcagcaagcactcagtttatttctgttgaatgagtgaatgattgaatgagagcctccactgcagctctgggctctcaggaaactgcggtggcctctgtcctccagacacccctcattcagtgttggttgtcatagccattccagccactcttgaaaaacataattttgaccctcattttatcttcatggggtgcatgtgcaggtttgttacatgggtatatgtgtgatgctggggcttgggacacaaatgatcctgtgacccatgtagtgagcatggtatctaacaggtggttttccatcccttgtccccaccctttctttctctagcagtccctggtgtctggttcccatctttgtgtccacgggtacctgatgcttagcccccactgatacacagctactttcataagcacctcaacttggaagcaacgggatgctgggctcccagtggagggcatgacttaagtttacagaagagattcacttgttgaagggacctgccgtcttctaaatttgaagtccaatttgaaaaactgaagtgctcttagacatgtgcagccttccagtaatttcccgctgagttccactgcacttcccagagtcaggctcctcctctcatcaggcctaagcatttaagcaccaagtgaggaaggaattcaaacagcttcgggacatgtagggaggatgacgagaaaaggaggagtgtgaaatgcctcccaaatatgtaacaacttgccaggtttttccagaaaataagcaattccctctgtcccccagcttctaggtgcaaaaagaaaacagctggatttccaaaatacaaaaggctcctgcctcccagttcccagatttgggcagcagagggatcatatgtccccagctttctccaagatagaggcttagtttggggatgtttcatgtaaatggggactagcgcacccgagacgccaaggaacaggatgggaaatgtacgagtggcaaagaaccctggttctgtgatttactggacatgtgacttgggaaaattgcttcctctctctaagcaattttttttttagttcataagctgtagatatgaatactgatctcttgttgctataaattatctcacatattaaagcacttggcacatggaagtctcccaaagatttcacagtcactctggctcagggtttactcctggaggaaggactttcttcccttcatttgctctcaagtccacttgactcccttggtcccactggcctccctcttgcacctctgcccctgtgcaggccatgagcttcacgagggtgaggaagaaggcgcaggtgtgtctgttcacagccttgccctgcatggcccaatcctggcacatgatggacgctcactgaatacgtattgggcgactgactcaacaaatcctagaggccatcgcagggcacaggcgtcctctctttttttctgcagaactattccacactttatgctgttccttgggcttccttaagcttctggtgatgagatgaaagcttattatatttcaatctattctctttctacctttaaatattggcattttactgtaagaaaagcagactttattttcaattcatataaaattcattttttaaaataaaaaaccctaagaatttaaagaaagagtaatcagccaccaggacttctttgtttttgtgacatgtgcctcccaggcccatgccacgcattcttcaactctctcatctctaacacaactgaaattccgctccccatgtggctgctcttgcagtaaaatgacaattgactgccaactttcctgagtcttcagcttttctcttacattcaacaagataaagaagcattggaccaggggcccagagtctctgagctgctttctcctcacctgtatgtctcctaagccctcataggagcagcttcagtcatggagggcaccatgctcaggttgtccacagctcccaggtcatcagcaaccgtctgtgactctgtgcaaagctgaagggtgacgatccttccaagacagtcaccagaacactgtgtgtgtggggagaaggtggacagaggaaggaagagccctcctggcattcaaggcttctgaccacaacctctccctctgtccagagggggcggggtctccaagccacagggactgcatgctcagataggcagttttgatgatgctgcctcccctactccacagctcctcatccttccttccctccaggcctttcacactggggaagagggtgttttgcttgatgccttttgaagcctgacctcaaagccaagcctcaatccccttcttcaaaaagcctttcctggccttcctgaggcctcccccacacccctcaccacagtgagtttcactgtctgtcagtgaggttgcacgcctatgacacttctgttttcacagtttccctgcacagagcagtgggtaagtcacagaatcagtgtcccatcacttaccggctatggaaccttagccataaaaaaggtcttcatgaacttcagtttccacatcggccaaaaggatgataacacctaacacatggggttcttgtgagggttgaattagaataattcctgtgggcagatggcctctgaaagcgtgcaatgagatttacaaggatgtcaatggcagtattgctttagtttttttttttgtttgtttttttgttttgtttttttgagatggaatcttgctctgtcatccaggctggagtgcagtagtgcgatcttggctcactgcaacctccgcctcctgggttcaagcaattctcctgcctcagcatgctgagtagctggaattacaggcacccgccaccatgcctaatttttttttttttttttgagacggagtctcgttctgtcaccaggctggagtgcagtggcgtgatctcaggtcactgcaacctctgcctcccgagtttaagccattcttctgcctcagcctccctagtacctgggactactggtgtgcgccaccacacccagctaatttttgtatttttagtagagacagcgtttcaccatgttggccaggatggtctcgatctcctgacctcgtgatcctcccgcctcagcctcccaaagtgttgggattacaggtataagccactgtgcccggccaacttttgtatttttaatagagacagggtttcaccatcatgttggccaggctagtctcgagctcttgaccttgtgatccacccacctcggcctcccaaaagtgctgagattacaggcgtgagccaccgtgccagccagtattgtttttaagagccaaaaattcaggaaaactttttaaatgccaccaaaacagaattgattaaatagattttgattacatcccgaagtgaaatattatgcagctattaaaaagaataatcttccttctcagtcttcctcatggtccaaattgaactgcatttcataataggaaacagattgagaagataatcgtagtcttcaagatagacaaacagtagggttttctaaatgtcaaactcactgtgagaaatcctaagctcctatatactatatatgagtgaagcattttgctcagtcatcaactgacaatttttcttctaagaaagaggctgggttggggggctcagtggctcacacctgtaatcccagcagtctgggaggctgaggcaggcagatcacctgaggtcaggagttcgagaccagcctggccaacatgatgaaatcccatctctactaaaaaatacaaaaattagccaggcatggtggcacgcacctgtaatcgcagctactcaggaggctgaggcagaagaatcacttgaacccaagaggcggaggctgcagtgagccgagattgcaccactacactccagcctgggtgacagagtgaaactccatctcaaaaaaaaaaaaaaaaaaaaaaaaaaagaggccagcgcactgtccattggatccatagttctcagactttgtactggatgcttgagaattgctgggatcccctgggaagctgagagaatcccaccataaggctcctcaacttacttacactctgacctcatctgcaaaattccttctgaagcctgttcttttaccttgaaccttggaattgttccataattttcaccctctgtatttcccccaaatgcattcagaggcttctcctcacacaagtgtctgccatttattggtggagcatttgctgtgctctaacagggacttaagataggaataataatgaaagtataggaccagagcctgctgcgttgtgcagagccattcaatgccagcctgccgcagagaggcatcattgtgtctgattgggggaaatgattattttttgccttgtcttccactatcacctatgaaagcctcctagagtgtctttgtcttccccacacacatacctcacacatctgactcactgctcttactatgtttcgggctttgggaactcagtccattcaaattccatataaacactgatgaaccagggcccaagtgagggtggactgtgagtgagaagcctctgatccgggcctctggctctacaggagctcatggagctgaagtggcaatgcctccagctctgctgctggacagacctgaatgcaaatctgaaccctctgccaccctgtttgctcatttacagaatggtgtggtatcacccatctctttggctgcttgtgagaattaagagaaatgaggcgtgtaaagtccctggagcatgggaagtcctcccaagaaagcatttcttgagctgctggaaaaacatctcctaagtctgaaagaacttcgagcagtcaggtggtaaattttgtcagtaaattattacagaataaaagcatatgcgtgtacattgctataaagcatatcagagatttcaattattaaagcttttaaacttctgaaaactgctgcaacattgcaaagaagataaccacaggattggaaactgaacttaaagaacatcatagtcaacatgaaagaacactatttgcatatgatgtttcatataaagtatctcctaacaagggagctaattctaaaattatcttttataatttatcaatgtaaacatatggtgatagaatacataaacagacatttaaaattatgtacaaagcaggaagtcctttctttttttgtacgatcttcaccaatttcagggaatttcagaggacacattaaaatgacattgtatgaacttgcctttaaaattaaattcagaattatgcaaaaccgattgatgtgaagacataaaacctcttagaaaatttgttccacaaaaattatcatctttagttttactaaaaacttttcagaaatgtatcccaatactgtcactcacaatttttaacgactccaataagaactaaatcagccaaaaaaaatcggtttctaaaattaaaattatcaaaaattatttgtgaccttacatttgccaagtgactgacattgctttcaaatatgtcaattggaaattaagttgctaaaagtaaaatttctgatgacctgataaatgaatttgcaaaaatataagcccgagaaatttatcatcaattaaggtattatactgataaattgttatttgttgtattgtatgaattatgacacaaaaatattttcttaattttaaatttatattgttgaatatcatgattaccttaatgtattacaaataacattatttttaaaggataaatctttatattttagtgcctttaactacaatttttctgcttttatattgtgacaaaatacacatagcatacaatgtttcattagtgatattttgtacgttttttcctgctttttgtataagggacccgaaaataatgtagctagtttagcatatcttcacccattgcccacccccttcccctcttcaacctctaatacaaagggccaaggattaaaatttcattgctcttgaatttcaaccaggaagtggaaagtgaaatttctaggtaacaaggacttacgcaagatgtaggtccagtaagtatcggaatcagatgccagccccagagccatgcttgtctagaggagcacacgtcttgttcacagtggggatgagatcgtctgtctgagattgaggctgagttagcagcatctgtagactcctgtgagcaaggctgccaagtttggccctggtgaaccccttggcctctccttcacaaagcctcctgctaccatctgcacatccccaacccctccttcacctagaacagtcctgtccccaggcgttcccttctgctgttagtgaggctgaagctaacattctgagcctctgagggggatgatgacagcagctacgtctttgggtgatgagtgttatggctgcagaggaccttgcgagggcggggctgagtggtttggaagcctatttcctaaggcaccttacacactagggggattccatggtcagagtaattaaggaagggtggataacacggtgcttccgaaggatttgttcacagagcagcacattaaatgtcctgagaaattccagtaagacacccaggccttcccaatcttatctggctgcaaggccttagaactcctaacagttcctgggactagggctccgcagaacaccctttaaaatatatgttttttgttcactgctctaattttaaggatggggagccaagattcagattcaagggaacacacttaagatcataaagtgagatccaagaagataatgcacatttttattccccaattttaggttggtcttttaagagattcaaaggaaggagcctctaatggtgacaatgtaaggctgataattctggagtctctattgtgcgtgtgtatgggctgtgtgtgtatgtgtgtgcatgtgtgtgtatatgttttgtgcgtgtatgtgtgtgtctctgttgtgtgtgcatgtatgggtgtgtgggtgtgtgttggtgtgcatgtgtatattggtatgtatgtgtatgtgttgtgtgtatgtgtatctatctgaatgggtgtgtgtgtctgtgtgttgtgtgtaatgtgcatatgtgcatgggtgtatgtgtgtgtatatgtatgtgtgtgttgtgtgttgtgtgtatgtgtgtatgggtgtgtatgtgtgtatgtgtttacggatgtgtgtatatatgtgtgatgtgtgtggatatgtgtgtggatgtgtgtggtgagtatgagtgtgtacaggtgtatgggtgtgtatatgtatgtatgtgttgatggatatgtgggtgtctatatttgtgtaagtatgtgtttatgtttgtgtgggtgtatgtgtgtgcatgtgagtgtgttgtttatgtgtgtatatgggcatatggatgtgtacatggatgtacgtattgtctataaatgtgtttgtgggtgtgtgtgtatatatatgtgtgcatgtatttgtgtgtgttgggtgtatgggtgtgtgtatgtgtattatgtgtttatgaatgtgtgtgtatgtgcatgtatgggtgtgtgtgtgtgtgtatttggatgagactttatctgtatctctgcggtggtatgggagctggaacccttcctactgagctgccctctctgttccggatttacagcaggactaaacagcaggagaaaccaatgaaaatacagtccactaatgcatccagtctggacggggcagtgaatggaggtcaggaacttctgtggtgccagtcccagctctcaggctttttcagcagctctgaggaggtctcaggcataggttccaaaatcagaagccttcaggaatgagccattctggatagtcatgttttactggtcagtgagaatttgtttcctttaaaatcaaaattcttcaaaatatattaatcattttggaagaaaaatttttcatattttatagtttgcattctttcttgcacagtaaggaaatacactcggacatattttggaggtagttttgaatttttgtttttgctctctcgtgcctgatgcacagaccctcagacactatcagagcctgccttttgggacataaaggtcattttgcccctatactaagcagactgaagtttctacattttacaccactgtaactgctttatatgttttcctggtttccctgtggcgcaagtctgcagtctcattttcgcttcttcctctgcttcccacatcaccatatttaatttcctgccagacctgcatgtgcgagctgcctgatctgggaaagtcatttgatctctcagaaactcctttcctcatggtaaatggtagtagcattgcttgcccaacagtgctgccatgttgagtaagacaccgtgagtgccttagcctcccgccctcttcttccaggctttgctggagccctgctgagggagcctcatgggctggatgctctcgctctctctctccttctctctctctcctatgagtcactcttgtactgttgtgtgatgcttccttctagcaaatcactgtattgctgaataacaccctctatagagctgcaagaaactcttgctttatgatttttttttatttttattttttgagacagagttttgctcttgttgcccaggctggaagtgcaatggcgccatctccgctcactgcaaactccgcctcccgagttcaagcatttctcctgcctcagcctcccgagtagctgggattacaggcacccaccaccatgcccagctaatttttgtatttttagtagagatggggtttcaccgcgttggccaggttggtcttgaactcctgacctcagctcatttgccagcctcggcctcccaaagtgctggtattacaggtgtgagccactgtgcccggcctgttttatcagtttttaaggtcttgcttgattttaaccagttagagaataaggtattttcaattagagaataagagaaaaattctgctgttgctgttgttgctgtttttcctatctgggctcttggtattgggctgcaggggagagaacgttcttggtgtctgtttggctaaaattctattgagtgagatggcagtcatgaggctaatggtgatgattccactcctccctccttcagagcccacgggaagacagcacttccccatccctctttgaagtgtgttgctgcatgtgacatgctttggccagtgaaatgcaagtggaagtgatgtttgttatttccacacccaggttgtaattgcccatgtggtcttccctgactgtgctaatcatggagagatgggtggaagtggtgcctgggctgcccaaatccctgaatggccacaggaatagagttccccgaaagcttgtgtttagacacagagcattagcaagaaatagtcttcttttataataagccactaactttcagggatatttgttactccggcataaccctgtatgccctgactgatacagcaagtaagtaaataacatagttctctcccaagagtctttattagcagcctgtgaagtgcttttttcctctgacttctcatttcctcttcaaggccaggacacctagcaactagtctcaataacccattcattttctttgtggatagctctggaggagaaatctacagccctgcccagctgtgctctctgtttctgaccctgcagccctggtttagactcagtcgaacatttacccattatgttctagacctgtgtgatggtgcatctcccctccccctccatcacattttggagcacatggaagcttttccaagactatttcagcttgccagtttcctgtcagatttttcattgtatatttttctaattaagttaattgaatcgaaaagtctcttcatataaataacagacctctcctttctctcactgcttgatgactttcaactacaaagtcatttttttcctctcttttatttgacttcaggcaccctttgctaaacacttataattgtcctaatataaaagcaatgcaactgatttccacactatgaaaacatttggagactgctgtgtgtgtgtattcatatatttgtaattttttaagctctagcaagagcctcatcttttttcccctaaaatccctttaacattcttagcctagctgagtgaagatagccacaatcctggctcagtatagtcacttgtaattaccttcaggtgcaaaagagttcttaatgcttcaaattctctttccactgtatcaaagtaaatagatgtaatttattattgaaagcgctgctgctatgccgatgtagtgggtgggagttgacatttgggatattgtgtaatgtataatgagtctgaaatgagtggttctgatccagtcagcatcacaggcaatttccctggtaaggaaaaatgcctgcaaattaagttgcatatcttcactaaggcagggaatggcataaactgtggaaatattgattctgattctgcttttcttagaaattgctctggatgtgtattcagaaacatgttttctctgagacagaaccctatattttcagccagaatgatgtttgaaaggcatctttggtaaggactgtttctcagatgctatgaaaatgaaatcaatggggctaatttctccttgtcgctttctatgaatgctgcatgagggattgcagaccagccacaaaatcaggctgaggaccactgttccccgcctgtccttttcctctgcagcccaggctgtgcagagtggctttgcccaaagggagatccaaaggtggggcttgctcagaaatgacaggctgggaagttattttgtggctaagaggaggggagaaaatagctgggaaagagaaatgacatgcatgggctgccaggagaagatggaagagagagccaccacctgtaaaacagcaacattatggaactggaaggcaccaaccacaagatgaagaagtgcgtaaatttacctggaaatcacactgaaacgaggccagttttttacaccacttcaggaactagcaggtgctctgtctctccagcctcactgtctcattctccttcttacccttgctgcctcaattgattgcagaaattacattccagaccatgagtaaaggactcaatgttgctgcccgacgagtcttttctgctttctgacaacactgttggtttgcacagattcacttaaaagtgttaaaaatgtcagacatctgttaaaaatgtcagcagtggttttgctccactcttcccacataccagacaggaaaacagagacaccaggtgccctgcaaacttcccttagggggatgcctgttcttcacaccatggattcaatctttggaacaaaatcaccagctttgtaaggcctcaaggtacatcaattaattacccccaggaagagccatacacagtcagctatcaaagggggatgagacctcaacatactgtgggctgtcgtctgtcacccccagcactgaattcagttcttaccctcgctcacctgtcctgggctcagaggtacatcactgtagaccacagcacctgggatttcttccctctgcttttctgtttgattttaacaatgaggtgcattgtcaggagatgcaagggcagaaagagaaagaagttaaggcatgtcttttccctactccattcctgctttataaccatgtttctggcagtggttaatccttccatgaccacagatcctagatggagcctgatggttctagctctcattaggccccagtaatgccattcctcccctcctgtctttattcctaggggatggagagcttgttgctagtatttggatgtctcagcatctctttttagttttcattatccctacctgtaactctatacactgtccctatattgtagtctcttcattgaaccatctggggtgccttccatttctcaatggtaacatgcagtctaagttcaatagagctaaggagccctgaggctgaagtagccagggaagtctttccaagagagatggagcttgaactgtggcttggaggaattgtacctatctggactctgagtttgtgttttaccatttgcaactgaaccacttggcttaagcagaggaatatttggtttatgtaactaaaaatttaggggcttcaggcatgtctgaatccaggacctcaaatgaaataaatctccttctatttcttagctctctttttattatcattattattgtgtcattccctggcaagttctctctgacacaaaattgactctaggaagctccaggcataattcatcccattagcacagagtctctgaaggaaagagcaatgctatctcttctaacacgcaaggcaacttcttttacagaaccccattggtcttattcaggtcatacccctcttttctcctccccctgcccagaaaaaccagtctccagagaactggggcattctcattggctgatgttttcacacctgtggctaggaagtgagggcctttgggttgagtatgtcctcatgctggaaaagaacaacttcctgaaggaaggaacgtgaaagacaaaaagagtcatcaggctaggtgcagtggctcatgcctgtgataccgacactttgggaggcgggtggatcacttaagcccaggagtttgagaccagcctggccatggccaacatgctgaaaccccatctctactaaaaatacaaaaattagccaggtggcatatacctgtggtcccacctactcaggaggtggaggcgtgagaatcgcttgaacccaggaggtggaggtcgcagtgagccaagatcatgctgctgcacttcagcctgggtggcagaatgagactctgtctcaaaaaaaaaaaaagagtcattgagatccactacagatctcaacatttcacccacctggtctcaaagccagccaaggcccagtgggataatggttaaaaagcctcttccctgaaaatgagctgattctgaacccaaacatgggcctctaagttgaatggtagggtttgtatgagttgtcatgacctggaaaggcactttgctgcatgaatcgcctctgtccctgggactatctctaaaacttctagtccatagacctgcttgacacagaggcccgcaattcaactctgaaggtcaaggaattgaaagtaatggcagaagatcaagcatctcttccacccccatcttttaggatcacccagagaaaagtgttgctaatagcagcctctttgtttctcaaagaccaacaaagcttgtgttagcatatggcctgtacttatggccaaatgcatctcccaagcttctgcatcttatctttattttaataatttttatttttaactgatcatgcagtgacttccagggaagtagactacgacttcctggaacatttgcatttttgtacatttaaattattgttagctttgaaagcagggcaactgccttaggaccacaaagcactctactcaccctactgaaacagatagtggcagtttctgacgaattccacctaaaaattttaagatagaaaatgtgtgtgtgttgtattgtggggcgatggggaaatggggcacagtggcatggatttgagaggctcaagactctatttctaagatgccacagcttcaaagggcacttttctaggtaatcttaggagacagcaggccttagaactctatgtgtgtaactactagttcaacatcttgtttcatgagtttgtgtccaactttgattttttcttagtcaattcaccatcattattgcactcaacgagatcataattccactttgatctattcatggtgtctgtgtttaccttaaggactgaatttttagtggattcttaacttagctgctgtatttaaagactcatcttggctgaattacatcataattctgaggcttctttgtttttccagaactatgaacatttattgccatcatgggatgccttcaccaataggccttgaaattcagaaaaagttaaagaaagatcagagacttggtgccatgtaaaacttgaaattcatgaccttcaggcctggtgcagtaattccagcactttgggggaataaggcaggaagattgcttggtgtcaggagtttgagaccagcctcagcaacacagtgagaccccatctatacaaaaaataaaaataattagtcatagtggtgtgcacctgtagtcccagctacttgggagtctgaagtgagaggattacctgaaccaaggagttcaaagcttcagtgagccaggatcacaccactgtactccagcctgggtgacagagaaacaacctgtcaaaaaaaaaaaaatcatgatcttcagaattcccaaagatgattggggacttgctaagagagatatgatctcaatttgctatgcatcagagacttgccaagggattgctgcacactggctctaggccagccccacaccaagcccttgagagggaaaacaagatactcttagtctatattggacaccaagagctaccaggagctctcattttccttaatcttccctgagctctttgaggcagggcctattgttacttctggtttacaagaagaaaactggggcttggagaggtgaaggaaattgcctgaggctaatgagctgataagtgggaatgtcagaatttgaatccaggctttgtgactcagcatcttgagagcccactactgtatttgactcttcttacaatctagtgtctaaagcaatttgtgaacaaggccatatcttcctagttgatggaatgctgaccataggtgtaaaaagctttgattaaccagagcacttgtcaaatgggctttcctagttaatgaagaccttttgttaagaaaagtgagggggagaaggaggagagcagatagtggtgataagcataatagcttttatggttttaatgtctcccccaaaatttatgctgaaatttaattgtcattgtgacagtattggggtgaattctttaggaggtgattaggtcatgagagcagagccctccagaattgatgaatgctgttatcttgggagtgggttagttattaggaggatgggctcctggtaaaagaagaaagctcagccctcttccctttctcactcctacccttgcttgcctttctgctttccttcaagttgtgatgcagcacaaaggccctcaccaggtgctggtgccatgttcttggactttccagcctctagaaccatgagccaaaaaatgtcttaaaaaaataaattacccactctgtggtattctgttatattaaggcaaaatggactaaaacaatagtcaacctccataaggacctactaggctaaatgatggccctgcagagacgtccacgtcctctgatccccagaacctgtgattgtgttaccttacccaggcaatgaaaactttgctgatttaagttaaggatctcaagatggaaaagcttctctgaattacttaagtggggaagatataatcacaatggccctcataggagggaggcaggaggatcagagtccatgaaggagatgagatgatgctgtgtcacttgctggctttgaagatgggggaaggggtcgtgggccaaggaatgtgggcagcccccagaagacaaccagaggtagggaaacagatcttccctagagcctccagaacaagccagccttgcagacacctcgatgtttgactaatgacatggattttggacctctgacctccataactgtaagataatacctgtgtgttgttttaaagtttgagataatttgttactgcagcaatagaaaccaatacaatgtgctgtatatcagtgcttctaaaccataatgtgcaaagaaatcacccaaggtattgttaaaatgcaagttcctgtacagcaagtctaggtggaacctcggagtcatcatttccaacaagtttccagggttgctgaagatgctgctgtgtaagtcatgctttcagaagcagggctttgcacaataatatctcccttaattgtcataacgactatgaagtagcttttaatttccattttacggttgaggaattgagactgagagtttaaataaatggtctaaggccagaaagatagtacatggcaaagcatggcattgaatccagtttaatcagagttcaaaacctgtgttcttgccaccaacatccaaagaacatgaaaaatgtaaatcagggaaaacaaaacagcaacatcatcattttcacgtggacactggcaaactttctcttctctagggtaaaagtggagaaggtttgggatgtgaatagcagtatttgttggtagcagaaggccatgatatgattcacacgttttcctgctctcagagaaatgatcactccattcacacatgaaaagagcctgaggctcagcacttttaacttacctccaacaaaggcaatgcttagtttttaattgtgtgacttcaaagccaaccattgtgtttgagggattaaattagttatagagaacactgaaggttttttttttttttccactctgcaatgttttgcaatgagaccttttggaattcttcttcggattattaagaaacaatagtacgtacatgggaactcttcagctaaaaagccttccttcctttctttctttctttcttcctttctttcttctttctttctttccttccttccttccttccttccttccttccttccttccttgctttctttctttctctctgtctctctctctctttctttctttctctctctctctttctttttgctaccatctcaggggagctttgctcactgtagttttcactacagtcacatcaaaagttccttgaaagtacagctgcattctcatattcacatcatctatacctgggttttccatacatacaattaaacatgagccatcatttgggtttagaacatgcagtaactgtttctccatgtctttgcagtcttcttttggaaacaccaggttgtgaatctctgcatttgacagcagaagttcacagtttaaaccttggatttgtcactttttcactgagtagccatggccatgaggtttcacttctctgagcctcagtatccccagaggtcatacacagaggagctaaggaccggggagatgtaaaagtgctttgaaagctctaaagcaataaagaagtttgagttaaaactccctctagcgttttgtctgcagtaaagtggcatcaaatgtgtttataaaggttgaccttttcgggccgggcgcagtgactcacgcctgtaatcccagcactttgggaggccaaggcgggcagatcacaaggtcagcagatcgagaccatcctggctaatatggtgaaaccccgtctctacttaaaaaaatacaaaagattagctgggcatggtggcgggtgcatgtagtcccagctacttgggaggctgaggcaggagaattgcttgaacctgggaggcggaggttgcagtgagccgatattgcatcactgcactccagcctgggtgacagagtgagactccatctcagaaaaaaaaaaaaaaaaaaaaaaagggttgaccttttcctgcttgagttagtgaagccccatgaacattcctggttctttctctaacaccagcatttcttactaggttctcagagctcctgatatattagtttttcacagtcctgaattgaaggagaagttgagggcagcattccagaggcaaagttaggtcacccagatttgcatccttgcactgatgttttctaaccatgtgatcattaagaaagtaacatgtgctttgagcctgggtgctgccgtccaccttataaagataatatcagtgccaatcttaccaggctatttacatatagtacttaacaccatggctggcaaagatgacagtcagcaagtggtagttaccaatggtggatcacaacaacgctgacttgattaattgaggtctagctttgtttctgcatctctgttcgatagtttcctcatctggtccacactcagcttccctaggaaaatttaaggtctagcatcttctaaaattctctagcacctcatttgcataaaccaagtttaagaattatttgggcaatgggggaagacacaaaacgcttccttatatttctaccttagtagaactgatgatgacaaacaggaaaacaaccttacttatttattaatgcagaacaaataatcaaaacattgaaaaccaaccttacaggaagtttacaaatgtagaaaagaaataaagagtactctggaaacataggaggtgatgtccttgttcctttgtctgaaacaaaaatgtgctgcctgtctgcaattccctattagcaaaccatgtggagagagatgaccaggtgagttctgactattgacttcctcccattccattgaaaagaaaaacatttaggtttttttgttgatattcacgattggactttttatgcacttgaaacctccccaagggggttaaaaccccaccaacattccatgtctaaagcaaacatttgttcttctatgaagggctctcagaggcatgtttattgtcgaggtcaatatctcctgccctgactttcccttgccaaaacacgtttccaaagcatcagatctgacacttcgttgtagcatttgcagtgtgacagtcctgctgctttcacccatggacagctagcttgctagttttattttgcactttgtctttttttttccaatcaataaagttatatgagtagtgtttaagatgctacagtagatactgaggctgccagatagtacatgctaattaatttttaattatggctttaattttatatgatgccatttaattttattagatgtattaaagtgaagctgtcagatcacaggatctactgcttgggccagggtgagaaatgtcccaggggctgcatgcaggtgtgtgacatcattaagaatgtcgtaagtgggtgtctgctgcaatgtgcatattatgcacataaatgtcacatatgcctgagtggatgaagcggcttcctctcaggcaacctgtgaagttctggaaccactttgctcagtgcagttcaaagactgcctgggacactgagctgcaagctgcaagttagatcctgtgttgccaccgactggccttgtggccttggttaaccatggtattttgctttcctgagcctcagattctccatcagtaaactgatcaccttatgcttttgctttttgaaaaaaataaaaagcaatacactagctatgattgttggcattaacctccctgcccctagaaattgaaaggaaagagggagggagggaaagagggagagagggaaggagggaggaaggaaaggaaggggaatgagctctaagggccggtgtcggtggtttgctccatctcttgggattccctcccctcggcttccgtttgctttatcttccagcagcccaaatgctgccttcaggttagggccactttaccttcaagagcagaggctggaagtgtgtttgtgccacatccacaaattcccaggtgtaatttatatagcagagtcctcctcagcatcaggctgcagctgtaacttctgaagcaccatctttgctgggctcctcttctttgagtccactccccgacttcctatggggtcccccacagcatattttcttagtaaattccctgcatacaaatccttgactcaataaatgtggaaaagtgtgcctaagacagggaaaaagaactgggaagacagatcaggtcacaggccaagagaaacattttttatccaaccacagcaggaaaagcagagacattttacaccaagacttcttcattaattgacatgtttgtgtgtgtgagtgtgtagatgtgcatgtgtgtgctgaatgctgaacactgttctcttattgtagcaggctttaaagctcccaacaaaggaatcaagagggatggaatggcattgagataacatccgactgtctgatgaaatggtgctgtcagagggaatctgtattcctgtgcaagaactgcttgcctggatttccaggactggccacaaaaatgctgcatggagtcaaccattaatcaaacagaaaggactcacctgcatagaaaatagaatatggagcttcctatagtgaaacataaatcaattggtcagagcaatggcataaaattgtattgaatgtgcttcaaaatggcagagaaacgtgcaaggttacatactatcttaatttctaccttgcttcatttccatgaggcagaagcaacacactcttcagacgcatggaatttggaaagactactttcaagagatctttgatagtcctctgtgagcatacttatgtctgcctgagagacatccattcaaggcttgttttgctgccttctttttgctgatctcttttgattcagatggatgattcatgctgtctcctccaggaagtccctgatcttctggatagaatgaatgactctcctgccatgtgccctcccactttgattgcatttttctggaggcaccctgtccttacactattgactgggtacatgtgtgtctcttaaaataaaactcttctcaattcatgcgttcatttaactgacagttaccaaggacactgaatggtaaacatgcagacccttcatccagacacactactctgtcagctgtgtgtccacacaccttccaagcatggggttatcagaggtgaacaaggcactgaggttcctgcctggggaaacctactgaggggagaaagtcagtaaatgaaataattcctgtgggtgataagagccacaacagaaatgaaatagtgatgtgataggaagtggctatgaagaatttaactgcttgacaagttcttcctgcccactgcacccacgaaaccattcaccgagactgtggtgttgcagtaaagaaagcttaatagacgtgaggccagccacacggaagagggagttatcacttaaatcagtctccccgaaggcttgtggaggttagagtttctcaaggatagttcagcgagcaggagagggaagggggaatgttggttggttgggaatgaaatcataggggtttgaaaaacagtcctcatgcactgagttctcctatgggtggggccacaggaccagttgagtcatgagtcgagggtctaggtggagtcagttggttgccaaaactacaaaagtatgaaaacgcatctcaaaaggccaaacttgggtcctgcaatagtgatgttatctacaggagcaactgggtaggtcacaaatgtgactttggaaacaatggctggttattgtttgactatgcctatgtcttagcagaattcagtccctcataatcctaatcttgtgggcttttatttttttaaaggtggcttcgttttaagaaaggttattatcatccttgttttaaactatcaactacattctttccatggttagcctggcctatgcccaggaatgagcgaggacaggctgcagatgagaagcaagatggagtcagccatactgtttctctgatggtcatattctttgcagaggtggttacaggaactggggttcaggaacagttcaaggaggggacattttagctgagaatgaggcagccatgagaagggggtgcaggggagagtgagccagggagagggaaaaagaattgaaacttcctggaacaggggaggaacagtatggctgaggcctgggggcagggtgaaagtaaccaggaagtaaggtcaggagggtgggcaggggtcagcctggcaggaccttgtgtccctggggaggagcttagcttgctggtgccaaatgaccaggctggacatcttttttgtgtcctttgcatgatctgtccttgagagatgaccagaaaggtgtgaccaagtacctggatagtttcaagtgctgtaagttaacaggtgaggacagatcagagcgtaggctaccccttcaagctggcaacattcccttgactaaagctttcagcggagacctatgatttccacagtcagaagacacgctagacgaagggcgtccatccagtctcagcccagagtgtatagcctcctcgcaaggctctcactccaggtcacactctccagactcatatcctagcctgaattttttttttccgttgcttcaactcagaagtagcgactgcatcttgctggctcctatgccaggtgtgcagcaaacactaaatcaggaggtgcagactcacatgctgtgtgggaccaggtgagtggcatggacgagcaggacctgagcatctgggaggaagaccctggcagcaggaggaagcttgccgacaactcggacatgtcaacccagcactggcaaaacttctgacttctcatagaagctggaaatccatgtgattacataagttccttggattcgtaaatattgataattagttcacattcttaacactgtgtgtgttgaatatgtctatttgccaaatagtaagaagaacaaacatagtagtaagaaagtgccaggcgttcttggaagcatttccacatatagcaacctaaataaccctgacaactctccgaggaggcaccaagagtgcctggcactttttaataactctgttttcatgttactctgctgttacttagggcataacattttcactagactttctggagaatatagtcaattatgaatgctccaacgctctgcatcactatctagacaaactgaatgccatttcacatgtgcactagtctgcatggagaagtactaaaattttaagcttggacttgtgttcctaatttcctatttctagtgcattaagagatgatgggcattttaattttccaaaagcaatgctagtattcagcggcaacatgctacgtctaccacacagtacagtgaatagcagaactacaaaggtgggaggtgtaagtgaattcctattggaccttcccaataagttgtcttttttgtgccctgggcacttctcttgcctcaccttagcatctcctcttctgtaggaaacaaccctgcaaggtagaaatgattatgctcatttgctgatgagaggatgagctttggagagtggcttagctcacccaaagacacaaaattaggttcccagtcctatgaccctatccactgtacaacccttttgagatgtctttttagacgtttgcaattttggcaaccaactgaccctaccacccacacctcagactcatgactcagctggtcctgtggccccacccagaggtgaactcagtgcatgaggattgtttttcacacccctatgatttcattttcaaccaatcaacattcctccttccctcctctgctcatcgaactagtcttgaaaaactctaacctccacaagccttcagggagactgatttaagtgataactctctcttccatgtggctggcctcatgtctattaagctgtttttactgcaacaccatggtcttggtgaatggtttcgtcagtgcactgggcaggaaaaacttttcaagaagttgtcaaacttaaatagtagcaaatgagtgaataaggaaattccctgctgtcatacacataacctccataacatgtgacctaggacacattttctagatggggaaactgaagtacagagagattaaggaatttgcctcagccattcagtgaggcagtgagatcctgggatttgaggaagctatgtagctctagaagcctgctctttggggctaaactgtctgcaggttcagtgtggacagcctctgcctagagtgcatggcacccgtgtggcaggaaatcagccaaaaaaccagagctgcatgagcctgggccagaagcctcatgagtggagaggggccttggacactcaggtcttctcagggcccagaaagacaggtacatcacacaggcttccctgccagagtctgaactcctcaaagcaaacacctactttctacaattgccagggcagtgccccattcacgtggcatctgtgctgtttcggcaaggcaacatgaggccatcatgagctccatcatgcacctgcagaatgaccttgggttgtacagtggttagggacgtagggctgggaggctaactccaggctctgcgacctttgtgtccttggataaactaagccactctccaaagctcatttcctcattagtaaatgagtataatcatatctaccttgcagggatgttttctggaaggggagatgctaaggtgaggcaagagaggtgcctggggcacaaaaactgacagtagccagccctgcacttgcaggagcctaagagtgagggtctccttacatttcacacccagggcagcactcttgccttacctcagcaggccctgaaagtggtggatgatgcaggtggagggtacttggcatggtgcatggcgcacaatgggaacctgcaaagggcattcccaaccccctgggaagccctgagcctcctgcctcatgaaccaggccagaccgtcatcaggcactgtgagtgcctggagttgatggcagccatggctcctttcacagtgcgctgccggctctggggatgctgtttggctgtgtccttcagcctgaaaaatagctctgagtgataagccctcctgcccgatttcttgcagttgacaaacaatgctgccttgaaaacagctaatttcgaaaggagagaattatacagggatgtgtttcctccctcagagcattctgggaaaagccatggcaccactgcttacctaacaggttgaggcaacagggaatacaggtggggggcttgggggaatggctgtgatcagtgctgccaattcccagctgccgggctgcactccaccccaaactgcacacccagtacgtggtgctgtgccccagagaaagtgcccacataacaccacagacacctttccccatccatttggcccatatctctggagtgtgagctctgcgtcaggcagtgggctaggcgcagaaacagaatggtacggccctcgtccctgggcagctcacagacgagacaggcacttaaatcaaggcagcacatgattcactgctatgagggagagacagacaggtgcgtcacacaggctctcccctgcaagagtctaaactcctcaaagcaaacacctactctctacatctgtgcatgagtaacgagagctgagggcacaatagacggccaacaaaaatctgtcaattaaaaatgcagtgagcaacaatgcaagggactccaaatttagaaaccacaatgcaaacagtcaccagataaagaatcatttataaaaagaacctttacaagtttcaagtacttgagatgtggtccctgtaaatccccaccaccctcacatggtgtttaaaaacaaaagagatactggtggcatccacagccttccagagcctggaaactgggaaataaagttgcccttcctggtggggagtcaaggccatggtgagatttagtgaaaattcatacaaattgtcttgctgtgagacaaggaattagcccttctggggagagctgtgcctccttaagggctttaaaacaaaaacaaaaaactggggtcagaatagtggtagcaaccaagacactctggaggtgactgtggctccaaagcacggcggggagaccagcgggtggggaatgaccttctggctgggttgggtccaagcctgcttatttcctaggactccgtgcaggtcattccagctacgagctttgggcacatttccaaagctgatatctttgtggcggcttgggaaagaggccaggctcttgggcctcctctgccaaaacaaggttgtaaaatgagtctgctggtttcatactgggatgagaagaggagcgtgcaggacgtaaaaaaaaaaaacaaaaaaaaattaaaactctgaagaacgttgaagaattgagcaattacaaacatacgaatggatgcattaggaatgacagtcataattattccctgaatttatacaacctagaccactttgcatttcacacatattatctcattaattctcattttaatagtttaaaattgagtttgtgtgcatgtgagttttcctggaagcttcataaccatggtgggtgattttcacaggaccacggaagcctttgcagaggttttataaagattagtcctaattcatgaagcaaacaaacatcacagagggaaaaacattaacctactgctccctgtccccagaaatccatgttgcccctcggggttcccgcaggctctgcttggacttgccttccccaagaccccaactcccatgccagggctgtgcatctgcttctcacatcctcaggaaccccagcaagacccacgccttgtcatttatttctgagcctctgtggcctagtccaatgctcgttaaatctacacattaataggtaataagtgagtgaacacaaatgtgatgaatgctgtggtgagtgaacactaatgtaatgaatgctgtggtataagtgagtggacactaacattgtgaatgctgtggtgtaacaagaaatctacttgtgatctttttccagttcttgtcttagagctcctaagacccttgaaaatttctgagtgataggtgcatcttttctttttcataatcagcccctttccatgacacctgaatttatgctaatgaaggacttctagggcccctagatcttctcaggatggggctggtccccagataggccaaatgagttgaactctcagccccttgaagacctctgggaaggagtagggggcaggctggaaactaggctctgtaaaaactcttcagcaacaagatttgatgaacttctgggttgctgaacccttggaggtgctgagaggggggcacacccagaaagggcatggaggctccaccccaaaccttaccttgtgactctcctcctctggctgtccatctgtgtccatgatgacatcctttataataaaatggtaaacatgcttccgtgagttctgtgagccatcctagcaaattaagcaaacccaagggagtggtgggaatcccaacttacagctgatgggtcagacgcatagatggcaacttactacttgtaattggtatctgaagtgggggcagccttctgagactgagcccttagactgtgggatctgagtctaactccaggtagaaggagtcagcatagaattaaaatacaggacacccagttggtgtctgctggagaattgctcggtgtgtgggaggacacccatgcatctggccaccgaagtggtctgcattgagtgtgagagtagaggaaaagagaactttgatttttccttgacaaatgcccttgccatattttcttcgttaggcagttttttttacctttgaggtgcttaagccacacagtctcagctagaatgtctcctgagaggactaaccttgtgtcacgctttcccgtctggctctttctgcatttgataaagtgactgacggatgctaggtgctcaataaacatctgttaagttaactctgactttctcgtggttggaacagctatcatcagagcacaccaagagacaggtttaggagcctccatcctcttgtatacgtaagaggatctgagtggaggttccccagaagcagatctggagatgaagatttgagggcaagtagtttatttagatgaaattaggaagaaaagggaaaaccaccagtcaggtgcagctatggagccagccaccaccatgggcgggtggagctgaatcccgtggggaactctgggagggcacacagagttttcccagttgacgggccagcgagctggggtatttctccactggcccctgtaggtcatttttaggctactcctaagggtgctgattctcaatcacttcaaacctggtagcatcctaacagccagagaaaggcttcaggccaaagaacgcaggtcctggctgttggaagtcagagcagagagcaccggaatgaggagtcctgtgggaagacgggaggactctggtggcatctgctacaaccaccctttaactaggacccacgtggtgcatggggcccagaccttgactgtgagtccaggactccacctctgggtaagagctctcaggattttgcctctctctttcctgccccaggacaagcaggggactcctcatctctctctggctccagagcttcatggcaggagtaaaaactgtctgccagggccctgtggtagaaaggggaataccagctcaggatacaggggtcctgcttatgccttagtcctgcctctaatgagctgtatggctggatcaatggctcaccctccctgggtagagactgaaggcagttggtctggttcataagagcccttcctttttgccctggtcctgggcagcagactgtatggttcccctctctggatggccgtctttctccatagatattctgtattatcattattattaatgaggcaaggtcttgctctgttgctcaggctggagtgcagtggtgtgatcacttgaggtcaggagtttgagaccagcctggccaacatggcaaaaccccgtctgtactaaaaatgcaaaaattagccaggcatggtggcacatgcctgtagtcccagctactcgggaggctgaggcaggagaatggcttcatcccagggggcggaggttgcagtgagccaagattatgccactgcactccagcctgggcaataaagtaagactccgttcaaaagcaaattacccagtctcagttatttctttatagcaacaggagaacaaactaatacctttaggttttaagataagctgaaaataaaataactcaagtgggattcaaggtggtctttggaaactaaagacagaaataccactcgacccagcaatcccgccactgggtatatacccaaagggaaatgattcattttatcaaaaagacacatgcattcatgtgttcactgaagcactgttcacaataacaaagacatggaatcaatctatggtaaactggataaagacagtgtgggacatatatgccgtgaaatactatgcagccataaaaaagaatgagattatgtcctctgctgtaacatggatggagatggatgccattatcctaagcgaattaacacagaaacagaaaaccaaatatcacatattttcacttataagtgggagctaaacattgggcccacatggtcataaagatgagagcaacagacactgggaactactagatggggcaggaagagagggggctgaaaaatcatccactgggtactatgctcactatgtgggtgatgggatcatttgtggcgcaaacctcagcatcgtgtagtatacccatgtaacaaacctgcacctgcgccccttaatctaaaataaaagttgaaattctttttcttaaattaaaaattaaataaaatggtctttggcatttggggcctattatattagtttttaataatttttttttgtatccctagtttcttaaaccaaaaaatagagatctatgtgctggttgccaaaatactgttaaacacaaggataaaccaatttaaaggaacatttaaccacttaaagccagaaaccgtcctagattaaaacagcaggaggaagggaaatctgatctgcatacttaagtgaggggccttgacctgccctttctaaagcaccacttccccctgtccccaccacacctcactctcagggactttttcctacaattatttggtggcctcctctctcttcatgaaatgctccctcccttaatatctcaggtcctggctcgggtaacagcttgtcagtgaagcgtttcctgacaagtgcatataaaacacacacacacacacgcatgcactcacaggcgctcactcacacatgcactctctcacacatacacactcaacacacacagatacatgcacactcacacacacatacacactcaacacagtcatacacagaaatgcacaagcacacacacacgcacactgtctctctctctcacacacacacttacacacgtgcactgcgttccctgcctgcgtcatggttttccatggtctttgtttggttcctctccccgcaggctacacactccatatggcccagtctcaggaatccagaacactccggcacccaaagatgatctttattattgttgctggagaatgggtgtctcaagccaggagacggggactcactcttttctctatggggaaccctggaaccctggaaacacaccattctctgtgaggggaggtatggggacctgcccttttctgtgagggggaccccaaggacacgacctcctctatgtaggaagccctgagaactcactattatcagtgaggggaaccctggggacaagccctgttctgtgaggtaagacctgtggacctgctctttactgtgaggggaaccactgggacctgcccttctctgtgaaggcagtctcagagacccaaacttttctgtgatgggagccctagggacctgacctcctccgtgaaggaagccctaaggacacgccctttactgtgaggggaaccctggggacctgcccttctctgtgaggggagcccccagatcggccttctttagtaagggaagccctagggatccaccatcctctgtgaggggaattgaaacctgccctcatctgtgagggaaactctgaggacctgccctcctctatcaggggagccctgaggacccacgcttttgtctaaggggaaccccaaagactcgacctcttctgtgaagaaaggatccaccattttcagtgaggggaaccctggagaccagccctcttctgtgaggaaggacctggggacccaccctttactgggaaaagaaccctgaggacccacctgcctctgtcaggggagccctggggacctgctctacgttgtgagtggaaccctgagaacccaccctcctctgtgatgggagccgtggggacccaccagtttctgtgaggggaaccccaaggacctgacctcctctgtgaagaatccctaaggacccaccattttctgtgagagggaccccagggacaagctctcttttgtgaggaaagacctggagacccacccttttctctgagggaaaccctggggaccctccctgcttgtgtgaggaaccccagaagttcaccctcctctgtgaggggagccctgggtacccgcccttctctgtcaggggctcctagggacctgctgtcctctgtgagggaaaccccaggacctgtccttttctgttaagggaaccccgaggacccaccttttctgtgaagggaaccccgaggacccgccctcctctgtgaggggagccccgatgacccgcccttttctgtgaagggaacttgggaacacgccctcatctgtgattgcctctgcctggcaatgagcttctatagaagggcaactcctctttgcccttcctcatgacgtggccctcctggtgaggagccttttttaggatttaccctggtcttctgcatggccctttctatcttgtccttcccctgggcagcccctcctcagtgactcgatgtcccccttgaactttcctgtcagagtctgcaggggtcacagaaggggtggacgctatcctgcctaaggccaggaccatgaccctcgagtccaggagtcttacggctgacagtggggtcaagcaggggaggcgggggagcacctgaggcttggaccttcccttcatggagttgttaaaactgcatggggacttcaggtgacaaatccaggaagcagcaaccgtcattcagagccagcagttggcacgctaaagaaatctaaagaaatcctggggtctctgggtggtctggtatggattacctctgaagccccgctctttctgtgttggtcctgtttaaacctccacactgaaactcgtttttgctctgaccattatcaatatggaacacaggtgtgggctgagctgggcgggttgatgagagctgaggggaggacatgctgacattagaaaagtctctgagattagaacaagcccctggtccaccaggaaaggaaacagcaatgccagaaaggcaggagaatctggattcggagaggacctatgtcagtttctagatctggatttggggaggacctatgccaatttccaggtggacataatgaaaactgcagggtccgcttctacatccctggtgttggatctccacaaaacctagaacagtggcctggaacactgggatggttgtagtccctcagagtttaggctggccggaactgcacacacaaaattgtcaatcgtcactcccaactcaggactggcaggcacaacagtctccattgcccaggacagtgcagacaccacagtcccacacagcccaggacagtgcatacgccacagttccccatggcccaggacggtgccgacaccacagtcccacgaggcccaggacggtgcggatgccacagtcccacacggcccagatggtgcacacatacccttcccttattctccaggaatgggcagaccccacagcacctcacagtccaggcctatgcacacgctacattccccacagcccaggtctgtgcagatgctgcctcccctcatagctaggaccaggcagacgtgggagtacctcgcactttatgagtgggcagacattgtagtgtcttccaactcaagactagggccagagggataaggaagtggctgaaagaggccttgtgatcagaactgcgagcattcagagtgtgtacataatggctgaagatcagtcagaaccccgtagctctgcagatgtcagtgtggacagaggatgcccaaaggataaatttttttcttcccaagactaatatttaaaagtcacatgagtcttgcaaaattaaataacactctaggaaaaatttctggattcattgtatctggaattaattatgatgatcatttttgcaaagattgttatagaaaaaatagatttttatccttgtgcacatttggattttaagaaattagaagagccagtcttcaacatcgtcctgggctccataatccccttgcatccatgttggaagttcccactgggagcacacggggaagggtgccctgaatgtgcctttctgccacctgctctggggactgtccccattgccagggaactttgggttctttacccctccataggcaaaggagaaccttacacagaaatcagccttctgtcctcacacagtagcctcatcacagggcttccaggggccctcaggcaggtgggtgctgaagtttccccctagatgatcagcagcctgcttccacccgaaatccagtccccctggctgcctgtgacaagagagcccttcatgctgagtgctgctctcatcgcacctttttctctccgtgtttagacagagagagtggattcatgtttgattaaacagtgtgggcccaggaaaatcaattagcaagcaaagtgatccacagtaatcaggatcagtgccatctactaagctcccacgatgtgcgaggtcccatataagggcctcactgtatcatctcccttaatcttaatgagatgagatagatagtattatctttctcactttaccaatgagtgagagggcagagagaggttaatgcagaattgctaagtatctgatcaggatttgaaagcaggggtttgcaattctgtagaccttgcactacacttgtggggcagagccaggcatccctcacatcttggtgacctcagggagttgccaggattggagtccaagacccacccttgttggggttggggggcagcttgtgagcagcctggaatgagccccatgattgatcgctgcaccttccttcccacaagtgggtaatttggtctccttctttgttgcagtttttgcttttgttttttaatttgaaataacaccatccagttggcaaagcctgtggggagaaccattttattactttttctaaatataacgggaaaaagttgctgacccagagctctgtggcaggaacaaattgtgcaagttctgttaagaagaggatagatgtgcacctgggactgcagagaggggctcccaggatgggcttctgccagaggctgatgtccacattgtgttctcttccaacgcaatcatcacgttagacgaagcatgagaatttttcatcagctgtgtttaaacttgatgatgctacttgcaaaggaggggctttgagtcccaactcaagtcatacttcctctgggaagcattcctggagtttcatctgcccaagcaccagcattctgcattcagaggttcagtatacactgtctcacactggcgctgtctttagtatctaactgtctctccaggttgttttcctgggaggcagaaactggctctcaccttcttttgcccacactgtcagcacctagaagtgcctggcatgtttcagccctcagcagtcacttgtttggtaacagtcacctgaatgtcaaatcttgctctgtaaatgagaacagtaatacatatacaccctttagggctgttgggaggacgagggacaaagcataaaaagcatttatcactttgcctgtatgtagtaggcaattaattagtgttgactattataatgtgtttcagaaatgaatagctgcaaacagagctcaagttgtcatccctgtgggagtgggattatgtctcctggaactctatggaggtcagtctcctgtgtcatcatttaactttcttatcgatctgaatccacccgccgatgagaccttctggtgatgctgccctggaaggtgtaattaaaattaaagcaaaaccaaagaaatacattagaaaggagagaagcaagggctgggagtgacagggaggcaggttggaaatgcaaacgaggctgtgctaaaatagtctccacggctgggagaaggaagaaaccatccagaatctaagggttttctaagaaacggtaatggcaatgaggagggccgctggggaggactcacagatctaggtgaaccaggtctgtcgggagcatttgccgtgtctagtggcccaactcactcatagtatagaaggcaggagggggtggaagagatggaggggatggcaggagatcccagaagaggtgagtgtgttgtgtttttctatcttcaaggtcaaacatatggtctcccagaaaaccaacaccaactccaagcttagtccacacgctccaggtaggctctggggccctctggttcaaggcgcctggagcaatcagcccttcagatacccctggagatggtgattacttcatggcacatcttgtaacccaagccggtcccatgagaatgtccccaggatgagcacaggtgctactgagagcaatgactttttcccagtggactggatgctggggggatggggagatggtgcctttttaaatcctttatccaaaagctgaagcccgagacctaggctgggaagccgggtcaagagatagacatgaagctccagtgacttttttttctgagtccctggatcaaaccacacctgaaagtcacatatgtgtttggttttctagttttatgaagcagtaaatctgctttgttcttgaccagtttgtggtgaatttactttggacactaagcgttctgaggccccaggccccaggagggatacagtagattggttcacccgacatctgttctagtcctttctagtgggtgttcctttactgcaggggtgggggaagcaaaactccaactccaaggcccctcccagctagggctctgtatctgattgaggttccaccaaccaggtgtcctatgagacttgacttgcggccaagttgcatgaaagaggggaggcagccgtttcgctggtgtgtttgcagcaggtgcagaggcgctgcttgatccccgtatcactgccaagctggtggaacctggagctagtgcttaggataagacatgacgattcacctcctgtgtgattatagcaaaagcagcatgcagttttccggatgggccagttctgcggtgaggtcctgggtcccagtcctacagagcctgcccctgcaggccttccaggggttttggaagcgcctcatttccagtattcgcccccttttcttgaaatagctggagtggtttctgattcctgcatcagtatcctgactgatacagcagcaattctgcctttggacacggtgtttgctttccgtagtcaggcgttagcacgtcaggctcccccgaccttgggcgtcttactgcctccaggtggcaggaggctagtgactgctccctgaacccccagaagtatagatggaccatatttgtgatgtggttcccagctgacccagatttggagtggaggaaggagagatgaggaatggaggtgggtgcaaaaggataaattgactgaacttgaaaagagaaaatgctgccattagcatgggccattctccccgtgtgcctcctcggggtttgtgaagaacaggaattaagtcgttctgagcagcctccacagagttatcctaaaggcagatatacccggggttctttggccatggtgcatgcctgtcccactccagaggaggaagacagcaggctggaggtgggtttgggttgtttctcaggaatcacaatttgggatccctggtacaaagccaacttccttacgatttcacactgagtgattggcaccacccatgcccatatcaaacagctaaaaacacagccccaggtatgttccagctttctgggtcttctcagatatatgggttgttcctgagatcaaggacagggcactgtgttctctcagtgtagttgggcccctatatttgacacttcttttacatttgatttcaagctccaaataaaatcccctacatataaaggttctgcagattcactgactggatgccctcttgacttcctgctagcgtgccttactgtacagtaggacaatggtctctgagagtgggctttgaaacagcaggctcagcatcaccacggaacttgttaaaaatgcaaatataggctgggcgcggtggctcacacctgtaatcccagcactttgggaggctgaggtgggcagatcacaaggtcaggagatcgagaccatcctcactaacatggtgaaactccatctctactaaaaatacaaaaaaaattaggcaggcatggtggtgagcacctgtagtcccagctacttgggaggctgaggcaggagactggcgtgaacccgggaggcagagcttgcagtgagccaagattgcaccactgcactccagcctggctgacagagcaagactccgtctcaaaaaataaaataaaataaaataaaaataaataaataaataagcaaacatatggccaggtgtggtggcttattcctgtaatcccagcactttggaaggtcgaggcaggtgggccatttgaggccagaagtttgagaccagcctgggcaacatggaaaattcccatctctacacaaaaatttaaaaataagccgggtgtggtggtgggcacctgcagtcccaactcctcgggagaatcacttgagcctgggaggcagaggttgcagtgagccgagatcatgccactgcactctagcctgggtgacaaagtgagaccttgtctcaaaaaaaaaaaaaaaagaaaagaaaagaacacaagcctcaccccaaaccttatgaaatgttagctttctcacagggttattgcagtgattaaattgaaacaagatgtgtaacacatctagccaagaatctgcagttacagggctgacactctttgggtctgtgtgtaagggtgcatgtgtgtgtgtatgtacgtgtgtgtgtgcatgtatttgcacacgtgggttagtgtctgtgtgtgtgtatgtgtgtgcatgcgtgtgtatttgtgtgtgcacttatgtatgtgtgtgtatttaggtcactgcgcacaccctcagctctgtctgcgatggctctctttgtccatgatggacctgtattcatctttcagagttttactcaagcatcctttggtctatttgcctgtgagctcttgtcttgtcttactccccccgcttgtactagcccctctcccagagcttcctccctatccacattccttgtttgcatgagtagagtaatccctgtggctagtctgggacccattcacccttctcctgctcatggcatcctggttttattttgggaaattttgtgccacccagtcctaatccgtgtggtgtggtgggattgatcctacagcatattgtctgggctgaccaatcttattctacttcaaggccacagtgattgattcacaagtgagcacgggacatacgtgggtccaaggcgggtaggtctctagatctgggcttgaaatattggcccatttttggttgggatgggagaaatcctgcccaagcacaaagccaactttgagtaaagcagaaggaggcaatggagaccaactcccggctctgaatgcctgaatctgtcagtgaccaccttttagaccctgtgagtgtgtagctgtgtgaattaaccaagacctctttttgtaaattttaggggattttgttcttgtgttgttttcccaagtcactgtgattgtggttttttccccttgaaaaagaacgagttgggtttcgtgaccctgttaagggacctggtcttacaaatgcctggttcctgcaaagtcctcggtctatggtagacccccaggaagtgctgaatgatggaatgaatgtctaccaaaagagaagggctgagatcttttccttcagccttttcttcacctcttcagcatgcattcatgcggcactgcccatgctccaggcttctctccactgtgcaatttgcctggctgacaaattcccctgaccacctcaacctgcacagtatctgtgagatctcaggggatgagcagaaatgtctgcacccaaaggccaagtaaggcccctccacaaccctctgggctgaaagttgttgagttcagatggctgtgccatgcagctgtctgctaaccatgccccatagagtggagcagacacttgtaaaaacgtccctctgaaactggctctgtatggccccagcaggaattaatttgctattgtaaatgagattaaccagcctgtcttccaaaactcatttgtccatcagatggtgaggtgactggtggccaacctactgggggatgttttggagaggggggagctctccacagaaaacggccttctctgcccttaacttctttttgaattaggattcctcttccacacagcaaatgttggctcaagcttttgggcagctgcaggactgcagttagttaggggtaggaggcccacctgggatgggcttctggcagctctctgaagggtggagaacatgacctggatgttcctgcctgaggaaggaaccatggccacagactgggccctttttcctgctgctggtcaggggacttagaagccctccccgagtctctggaaatcttggatctgaactccaggctctgggcttctaagccgtgcctcccgctcccctgtcacctggtgaggaatatgggatgagggagaagacagggtgaggctggcacaacggggagagggtcggaggaaaggatgccagtgatgtgcttcagaccttttctaaaaccacaggttgaattgttgatttctggtcaggtgtggtggctcaagtctataattctagcattttgataggccaaggagggaggatcacttgaaatcaagagtttgagaccaacctaggcaacatggtgagacccaatctctatttaacaataaaaataaaaataaaaaactaaagtgttaatttccaaagccatgtgtctgtctccttagaaaacctctcaaactcactggagcaaacagcacctgtagactcagcgcgggagcgcctcttccctctacagctccacagacatcactgcactcccagcagcacaggcaggagcctgcaccaggaaaagctcagggatgtgctggcccactcctctcctctgacccttgaggacccaggtctaggggggattaagaaatatgccataggaaaaataaatgcaagagctgaatggaactagaatctctgtcgctggactcctagctcagtccctttcaagctgttatttaggattatcatcggactgccctgggcctccaattttcaggagtttttcaccccacccagagttttaaggcactcattgtgaattacacaaatcatggatgtagccctgctagcgctaagcaataagttgtcctgcatcgccccctggtgggcttttgagctatagtcatattaaatatattaaatttctaggaaggactgaagtggctggaccctacctctgtgataccttaattcctccaagactgtaagacggtcggctccatccacgcactccctctctcccacctgtgtggagcgcccttctcttttctcaaactggatttgattattatcccaatcctagttgcctttctcaggcactcagttctctttcactgaagctctcagcagagtgtggatctaggtgcactgtgcttctattggtttccaccttagctgggctgccttctggaaacaagaacttggctgttttaaaaaaatacatatatatatatatatatatatatatatatatatatatacacacacacatacacacatatacatatacatacatacatatatatatacatatatatatacatatacatacatacacacacatatatacaagcatgcggtgtataataatcccatcagggtaagtggggtgtccatcacctcaagcatttacctttcattgtgttataagcaaaatactcttagttattttgaaatgtacaataaatgattgttaactgtagtcaccctgttgtgctatcaaatactagattttattccttctatgtttttatacccattaaccatgcacactctcccctcccccaacccttcccagcccctgtaaccatccttctgctctctatctctgtgaattcaattgttttacatttttagccccaacaaataagtgagagcaggcaaagtttatctttctgtgcctggcttatttcactcaacataatgacctccagttccatccatgtggttgcaaatgacagaatctcattctttttaatggctgagtagtaagcactccattgtgtacatggaccacatgttttttatccattcatctgttggtggacaggttgtttccaagtctgggctattgtgaacagtgctgcaataaaaataggagtgcagagatctcatcaatagcctgattttctttctttggggtctatgcccagcagtgggattgctggatcacatggtagctctatttttagctttttgaggaacctccaaactgttctccatactggttgtaagtttgttgttttaaccttatcactggatacttagcactgggcacagtgctagggcgtagataagacactcaaatatttcttcaagggagggagcaaggaagacaaggaggccagaacacttgccttggacatccttgaaccctcaccacacatgatgtacagcctggaagaatagcattaaatcatggatggacaagcagatggatgaagaaatgactttctcctggggctccctcctgtcaaactcccacttctaatctccagtggcacaggcccctgtcctgccctagcgcctgtccaggtctaaagtggcaatcctgggaccccattgcctgcagtttcctgatgtgttttttgcatatatttttaaagacaacggaacccagagattgggtatcctattttttggtttaaaactgtcagagatgtttgaaccagagtgactccatcttgaataggggctggataaaaatggaaactgagatccgctggcctgttcccgggaggtcaggcattcttagccacatgaggtttatggttaaaggaatagttgaattcatgttgaccaaacagacccaagacttaaccgacccaggaaatgtcctaatgtcccgatatcttaagaacaaaagcattcttagtttaagaataagtttcgctttaaagatgcagattcttgtgaagatggtagttacacaaagattagcactcctttgacacagccctggtagtggagcacatcccccacagcttttgctttgttattctatatataatcaagcatttcagctaagatggatgcgttcctcctcttgcctttgggagcgccctgctgtgtctacgaagtagcccttgctttattcctatactttcttaataaactggcttttgctttactctgtggacttgcccccatttttttcttgtgcaagatccaagagccctctcttggggtctggattgaaacccctttccagtaacaaaaccacagtggccctgattttcttagagagagttcctgagagttcataagaaaagatttgagttctgattgtatccagatcaaccagcctgacctggacatgttgacaattgtcggtgccattacaggaaagtctccatccaggagaggtgggggacagggccggtgcccatttgccttctaagcaaatgcgtcagagactgttctaatagggaaagaaagtataactaatgaaattaaattcagggaaagaagatgagctctactaatgattaatgttcaacttaatagatcagcaagacatgctgagttgagaagctgcccagagggttccagcccactgcccaagcacaggaggaacaatgagaggagcgacttccgctccccgcacccgcggcttgtctctggggaaacacagttattaattgctctaaaatgtcagtcactttgcttcaaagtagccacttccccggctgctttctgatctcccccttgaaaatgacttccagtgtggacattgactctagcttgtgtttaaaacagaatttggggctgggcttagtggcttatgcctgtaatcccagcactttggaaggccaaggtggccgggtcacctgaggtcaggagttcgagaccagcctggccaacatggtaaaacctcatctctactaaaaatacaaaaattagctggacatggtagtaagcacctgtaatcccagctactcaggaggctgaggcagaagaatcggttgaacccagcaggtggaggtggcaatgaaccaagatcacgccactgcactccagcctgggtgacagagcgagactctgtctcaagaaacgaatttgggggctacctaacctatcaatgcactaggcttttacatctttttttcttttaaagacaagagtcccactctgtggcccagactggagtgcagtggtgcaatcatgactcaccacagcctccatttcttggactcaagtgatcctcctgcctcagcctcccaagtagctgggaccacaggcccaacaccatgcctacctgaaacaagctttttacaaagtgacaaatcagctcagttcaatacatgtgggtgggatcctgctgttctgctgccctgcccctgtggctgcaacctcagaaggcaaatacccacagggaacagacgcgcccagaacagtgtgaggcagggtccgcgggggcttccaaagaagaagacagagagctagaaggggcctcagctgaggcagtgcccgtgggccaatggtggccgcactgtcttcctggagggacaggccctgggctcagagcaatgtgccagctggggctgggattttctactctctcttttccaggcaccagtggcagataggaaaggaccactcccccagggttcccctttgggacacatggcctccttccctctccatcccttcctcctggggtttcatggagccccgactgtgtgctgggccctgcggcagctaaggtcaccaggctccaggccctgctcttgcaagagatccagacaagctgcctgggaagtgaacagtgggaagccacacaccaggagaactggagcaggcaggcgtcacggtgcggtgtggggaggggtggacatctgtatgacaacaaaatcctccctctgttttgaatctcgctgtattgaactctgcagtctttaaaataatgtaatctctaggactctgcagcttcccaaatcctattgacctgtgatttggataagaactgatctcatttgtgtctgaatgaatgaatgttgtctgtgcaagcagctgacttcagggctaggctggtctccagcatcataagagcaaaggcatgctttgtggttacagattggcactggagcggccctccctccctctcttttggggacctcgagggtccaggggcgaggggagccgtgccagcagcctgcctcagtgtgtgttctctgagcacctcgtgaccttgctgggagtgtgtctgatcagccgcttcccttgtgaccaaatatttggtcatggcagcaggagagaattccatcagtggacagctctatttttaaggctctggctttgttttctctttcctgagaggcagtccctgcagcaggcttgagcctctctcactgacagcctgcctcgcataatgttaagcaggcatcggacacttgctggaaggcagggaattgcaatgaaagagcacggaggtgagaagctgtgctccttggggtgaaggcagcttctgtgctcctgggatctactgttaagccagggtgacgccagcttgcatgctaccggaggggtaagtgtgtgtgtttgcgtgtgtgtgcacgcatattctaagatgacagcatcctgtctgcctatcactgcctgaagcacccctttctccaaccccactaatcagctcattcgctcaccttcccctatgaatgtatctctttgcccacccctttgcctgggacaacctgtcaatttccagccctcctctctttccttctcttttctgcaaaacctcgtgggatgccacatgagtctgttttgtgttgccataaagaaatatctgagactgggcaatttatcaaaaaaatgtataattggccatggttctgcagggtgtacagtaagcgtggtgccctcatctgcttctggggaggcctcaggaagcttttactcatggcagaagggaagtaaagccggcatctcacagagcgaaacagggagcaagagaggtgcctggctcttttattttattatttattgtattttttgtgtgattatttttaacttttattttaggatcaagggcacatgtgcaagttagttatataggtaaactgtgtgtcatggaggttcgatgtacagattatttcagataatgggcatagtactctgtagacatttttcctgatcctctctctcctcccaccttccaccctcaagcaggcctcggtgtctgttgttcccctctttgtgcccattggttcttatcatttagctcccatttataaagaagaacatgcgggacttggttttctatttctgcattaattcacattggataaaggcctccagctccatccatgttcctgcaaaagacatgatctcattttttatggctgcataatattctatggtgcatatgtaccacattttctttattcagtctactgttgatgggcacctgggttgattccatgtctttgctgttgtgaatagtgctgcagtgaacatatgtgtgcatttgtctttatggtagagtgatttattttcctttgggaattacccagtaatgggatttctgggtcaaatggtaattctgtttaagttctttgaggaattgtcacactgctttccacaatggctgagttaggtcaccctcccaccaacagtgtacaggaattcccttttccacgcaaccttgcgccaggctcttttaaaccaccagctcttacatgaactcattgctgcagggagggcaccacgccattcatgaaggatccacccctatgacacaaacacctcccaccaggccccacctccaacactgggatcaaatttcaacatgagatttggaaaggacaaatatccaaacacatcaagcaccctctaatctagtagctcaatctcagctctcctgcgagctggccctgtggtttttgcacatgcgcttcgtcagtcgagggatcctttctcctttgtgacaatgtgacctctcataggggacatgctgcctgtccagagccccatcagaggcttagctgctcttgctatccaatctctccagggacatcgcaaccctcctcttgcacacccgccgctcatgccctgagtgatagatggtgttgtgtgggctgtgctcctgttacgcacctgccatttgtgccctcaggaataggtggcgttgtgtaggcagtgctcctggtttctgctggagaataactggtccattttgaccttctccaaccccacagtttttacctctcttggactggtgcaggggagcatggctggaggccagccaagtagacattaattcttggtctgtccaacccttgggaaatgctcctttcagcagcgcctccaggagaatgtcccctaattcatagggtcccaccctttaggctttcttactacctactcctggacacaatggctgatccacacgtgagcactggagccatttgggacaatcatggaatcacccggggattttttgaatggagttgatggtgaaatatacagtctctgtgctatcaataaatatcctcctgttctggccggagtcatcctgggagaatggggctgtcatgcggggaggcagatagtgggctcctggtgatacctgaaccttgagcccttctccactgccatttgcttctgtcggcacatccacgtccctcttgaaccacagcaaccaggaggaggccaggcaaagaccctgagagggaggtgaagtggggcacagttgaaaaaacaacacgatttggtaacacacttcaacattgatcccaagggaaggtggattttaaaaaaacatataagaacaagacctttgccactgctcttgtagaagtggaagaacaggacagtggggccaagtgagaggccacctaatccatgggtagtgcctgcgaggcgtctgcaacattgacctggggctctccccactgtgggtgtgtttcctgtgagttcaagggttagtggaaaagaaaacagcaaagcaaggtcatgttaactggaaaatgtgattatcttcaaagaggtaagacaccgtgtgggcttctccagctcacctccaaagaagacacattcattcagatttgcctggatccccaaaagccccctttttgtaaaggtcaacaggaagaaaagtctctgatgcaccttagttctggattcaaaaatatttctgacatttgggctacatggcacgtctggatgtttttctactttctcagccttcctggatcgaaatcaagcttctcacctttaaagatccaaatatctaaccttcacctgccaatggtaatagggcgttttcagggtctaaaataaaaacaaacaaacaaaccctaaaagtaagcaagataaaggcagtagcagggacaccctacaatcattgtgcaggcgcagtcacaaagcagaggcccctgttgggtccagtcccacggcattgcaaagtgaccccaaagtggcaagtctcgattgattcaaagtttccctggccaggctgagggtgcacccaggcagaagaaacagaagtcccagcaggatctgtggcctgtgttttttctaaagagggttccaggagcttcagtatttaaaggggaaagatcaagtgggaggggaagaggaaatgaaaaaaaaggaaggaaggtaggcaatgagggcagtgttaccttcttgaaaagcccggatctgtgctcagtgaacattcatttcacatgcgaaaaggaaggcaaagggtagggggtgggcagttaatgatgcttttgtctgatgcccggtaaatctacattttacataagcaagcatgtgaaatgacagctatctgggaacaaaaggatggcagtttttgcatgactgggttcccaagctttaccttccctttggcatggtgagtttcaggtcctgagattcggtttttcttttacagcattagaaaaagaagatggatttcaatgtatttagacaaggcaagctggtctaattccacccacactacacttctctctgctgtcttggtctagtagctacactcagcaacatttccttttggctcgtgcaagtacttaaacattaaagtatcaaaaatttaaatacaaatgtcaaatattcacttgaacataaattaatatctgaatatctagaggtggacgtagggtgtagggttaaggggaattctactgtattctcatatccctggtcaccttcaaagttcattccaagtaatttacttatttatttgtttatttatttatttatctttgagacaaagtctcactctgtcacctaggctggagtgtaatggcgcgatctcggctcactgcaacctctgcttcctgggttcaagtgattcttgtgctcagcctcccaagtagctgggattacaggtgcgcaccactatgccgagccaattttttgtatttaaatagagatgagcttttgccatattggccaggctggtctcgaactcctggtctcaagtgatccacccgcctcggcctcccaaagtgctgggattacaggtgtgagccacttaatgtaatttaaatagtagtttctataatactaattcatgagaacaaccccattttactgatgggaaaaccgaggccctgagatctgagatgctgaagctatcaggctacaagtggtgatctgactcctataacagtgctccttgctcatttaaaaacatgataggcaccttttctgtgaagagggtggaaaattgcttcaaaagggctttgaaatgtgctacgtaaagtgccttggagaaaaggccgctagaatacaatgtgaaatgcagtgaattttgtattttaattgactcgaaggctcacacttgtcaaggtggggaaatagcaagtcaatgactgtactgcacacagaaattacacaacttctgaaaacaaattgtgttcctctaatggattttacctatgaattaaaaattgaaaattcaattttctctttggccagctgtgagcttttgcctgataggaactgagttccagctcacacagaaccccaaggctccctcaggaccctgggcaaagtccggctcgcagaggaaccctggctcccttaggaccctcacacaggacccctggctccctcaggaccctgggcagagttccggctcacacacgacgcccctgctccctcaggaccctgggcagagtcccggctcacacaggacccgcctgctccctcaggaccctgggcagagtcccggctcacacaggacccctggctccctcaggacactgggcagagtcccggctcacacaggacccctggctccctcaggacactgggcagagtcccagctcacataggacccctggctccttcaggacactgggcacagagtcccagctcacgcaagacccccgtctccctcacacccgctgactgatgaattcctgtgtgttttgtatccgtgacccaaatcaggtaaaagctgcatagagaaatgggaggcggtgggcacaaggatcgtgcgacgccccgctgtgggtgtgggacctgcagcctcaggggcatgcgggctggcagccactgtctccatgccgggtacgtagatactgccatcaccttggggtcagcatctagggccctattggagctcacactcagctctactgggcatcagattctgtctgggatgcacggcgggaattagagacatgggttggaagtggggctcagagatcagagacaaatgtggccaactgaaaatcaggctgggctccagctccggctgcagatgggtggaaaagtcagaggtgcagcagctgctccccagccgcgaacggctggtgaaatgggaatctgatggaaagaggctgcacggtgctcacctgagtggccaggcctccaggcccggcgagggggactctgaggtgagcaggtcggaggtgctcctggttttcccatcagccctggtcagtgtctgggggatgcccaggagaagcagcagaagccctgggtccctgctacccatggagtctagagggccgagcctttgccctgggatcggggagccagggcatcacagacacctcctgcctcatgctgtccctgcgccccggggcatcactcagagactcctccatggcaagggcgctctgtctggtgccagccaggagccaggggaagattcgattaggagactatgggtgccttcgcaggctttcaggaaactctgatggactcatgaggcctctctttcctggtagtggctcaggggtgctgcagtgtgtggctggtgtgctccacgtctgtcttgtcttccaaggggactccctggatcagagttaggcagggacaggcgacctgtttctgggatctccaatcactgccactggaatctaaggggactcacccaaacccacccacagggcaagcagctctcctcgcaaatcaatgatgttccaaatgagtttttccagcagagcacacagagacccctcttcaataactgcttaatatctgtaataggtcttattagtgttttctaagatagagtcctgttgagaaggccggctgagctcccgtgtgtctggcatctggctcggcagaagggatttccatgtctgcttgcaggctggggcccagtctggctctggatggaatgctggccttgcacaaaggaagggagctacagaaggcaggattcagaggctgagtcccccagggatggaggacacaagatgtggaatgcaggtgtcctgtgagcaggggcagggagcacggaagagggcagtctcaggctgtgcagaaggaaaggcagcagcagctgccccggccctctaggcttcctgggtgaaacccttggctttacaaagacccatctcttgaggggcatttggggtgaggcaggatggagaggccctggagtaatgatgtcagggcatgtgaaggaagagaagaagtggttctctgtgctgggttttggcagagaagacttggaaaggatttgagttaatacattttaaacaatgagttttcaaaggttgttccaggcagtctctgtagatgcctctcacgggaggaagacatctccaaccacatttcaggagccagccctgcagctttatccatgccaacagctgaaaacagcgccaggcagcaaatgtgcaaagaagcgtgtggagatgccatggggattcaggccttcagccttgccctccaggagatgaccacattggaaagttctgctccaccgagcttttgtaggcgttgtcagagagcagagcggttccacaccctgcattgcaacggaggcttaatgcagtggctgtgactgttccctccactggggagttcagcgcagagctccccgctgcaaggatctgtctctaagcacctgcctccccggaacaagtcatcacgacaaccaagagagcttgcaaccgagactacacagccctcatccttgtaaggaaaaaaagtgacaggtattaaatagtggctatttgaggaaataataataaatatctttggcagagtaaggctgatggctgcttgagtctcaatggctgagactctgtcagccttcccattatgaaacccatttttcagggtttataacttgaaagtaaaaatgtgctccaagcagaagaaacctggcacacgaggtctttgaccagaaagagggacctgaacagattagttcagatcaatttgagattgtaaagaaaatctgtcctgagtgtgcacatgggtctggcactgggacgaatcacccaattttggttgcaagcaagttaacggtaggggaatgttcatggaaatcttgcccagaaagtacctgcctgatgtttaactggaagtgcctataggtgggtcaaattctgggcaaagagcattggcccagtggctgctggagagtagaggagggggcacctttgcccctagaaagagctcagataggatctgaggctctaggaactgtgcccggtttcctgacctttctgagggaatccatcgaacctggcatctaaaggccattcagtgctgactgtcctctcgatgtcataagtcagattcctgcttctaggtcatccaggtcccaaaagaattactttgcctaataaatgagtacccaaatggggaaccctggttctccatcatcagatgcctccactccatttcccaaagcccttgacaaacaaggtaactggattcctgtccaaatgcaatgttcaaggtctagaaaataatcaaatgaaatgaaatatcctgttcaacactgaacagcctttagaccgtcagtattgctaatagctcgtggtgtcttcctgatagaactgtggattcagcagtgggcacgcatgccatttgcatcgattgtttgtcattagagggtggagataagtgagctgtggcagcactcatgctttctgggaattctcagttccagggcacgtggtccaaactcttagctgggtttggttgggaacctccacagttgaagcatcttatggaccagcttagcagtttaaaaacattcttctattttattttattttattatttttgtattttttagtaagtagggatgggctttaccatgttggccaggctagtctcgaactactgactttaagtgatctgcctgccttgggctcccaaagtgctgggattataggcgtgagccactgtacccggcctaaaagcattctattttttttcctgtgggaaatttggaaagtatagaaaaaaaacaggtaggaaaaattaaatacccaggctgcatcatctgtccataatctgtagctagccagtgataacatttttaaactccatccaatcacttctcagtgatacagagcaatatgctttacaaaagtgagattctattgcatgttttttacattctgatttatgtacttagcattgtattaggtgcatttttctgcctccatagatattcttagaaaaataccatttaaaaattaactccataatcttcccttgtatggattttaaatattctatttatggacgtattgttgttcttattttttgctattacaaaaaatgccttgatgggcacctttacacataaatacttttatgcttctgattatttctttaaaatgcactcctggaggctcctaaaaatgactgcatcaaataatgaacgtattacaagttgttctgatacaaagtaagacaccagccccaccacatacagtataaaatgcttctgctttcctgaaggcagagggtttccaaaacaaagctgaaattcttggataggttactatggccatgcctctttttgctttttttttttttttttctgttgtggaggtaaaaataccaaaataatattagtccacttttctgtgttggttggtaatatttcttcataattcctccttcccttcctttcctagttttggttcattgagagcagttcgcagtcccaccctcctgcctttgaccatgaccatatgacttccttggccaatgtgacatgaacagacacgtgccagaagctttaaacgtgtgtgtggagtttctgcccatcctctttccctcctgccctcagccatgacgagagcatgccccgcgagtcactgggcccagaatgaagagacatatgggacacacttaagccctagtgtcactctggagcccagccggccgagcagcagctgatgagcagtagcttatccatgaatgaaatctaaatgaatgtgatttcagccacagaaatttgggagaggtttgttacacagtattatcacaacaaaacctgatttgaagagctttgtttttcagaggaggaatatgaagcttagaaagatgaagcaatttgaccaaagttacccagaaatcaatcgaagagtcctgttgaaactcaagtctgccctagttctccaggcagtgttgcagcgtggttggtgcacacaagcatggttttataatatcctgtatgctggctggagttttaggggtttccactgatgcctatggcagctgtaggcctgatatcctgccccactcaggaagacagcagctatcgtagacgaggtgacggacagggctagagcagggcctggggaagatggcagcaaaacagccggtgtgaaatgactggccctttaagttacttattacaacgagtaattcatttagaatttgagaaaacgaatgtcagaatgtggtgcttcacacacatgtggattcatatgtgtgaacctgagctagggagtcacactgctcagtgttaaattctagttccttcgctccccagctttctgacttataagttattgggacatctgtgtgtttcagcttcttcttctataacatgggatgacaggagtgctttcctcatacgaatgatgtgatgattaaataatacttataaatacatggaagagtgcctggcatatagtaggcactcaataaatattaactaattactagttttaatatctgcccttcatagcccagtggacttgatctaaagcactggccactttagcttactttttctgctaattgaaccaattaaccatcccatggttaaggtatgagagtttctgaacataaaatcagccctgattatttggagttgtgttcctttgatcattagtaagtttggacgtgcaaattggcaagtggtgtggctggggactttgccagcaagcaagatgtttaaaatcatatctcaatctcatctccaattttgcctttatcaaaatcctctgattataatccagttgcacagagcacgagactgatgtgcattaggaatcccattggccctgaaatctctaaagcctctttctgtttggactccacacatgaacacatgccatttgcatgtttcaaatattgagtgtcagctccttaaaaaccagtcagcaaataaatgaacaggaaagaaagatatggatctaggcctggatattataggtgatatgaatttatggctgtggccagattgccagagtcatctaggatttagcacagttgtcagcagcaggttagctcacagggagtcttctggagtctgggatccagccaaaggccagcaagacaactagggaacagaggtggaaaaattggctagctctgctgattggtcagatgcttggccccaccgcaagttagttttgttactttgaatggatgatgccgcttcctgctgactgagctcagcctggttcctttctcctgctccctgcaaactccattaactgctggaggctgagactgaggcctgggcctctccttggaccaaacctgcatgtgctcctggtgatacatgaaacaggagaagtggggtggaggtgcagaaagtgaagagtcctagacgtcaagtggaaacttggtgccaattaccttcttttttttttcctgccacatccaccaaagccaggaaattcctttctttgtggaatctgcttttccaatggagtttcccatatgattaaacactttgattatatatatatatatatatatatatatatatatatatatatatatatatatagtttgtttgttttgttttgtttttgatggagtctcactctgttgcccaggctggagtacagtggcacaatcttggctcactgaaacctccacctcctaggttcaagtgattctccttcctcagcctcccgagtagctgggagtacaggcgcacgccatcacacttggctaattttttgtatttttagtagagatggggttttgccatgctggccaggctggtctcaaactcctgacctcaggtgatccacccacctcggcctcccaaagtgttgggattacaggcgtgagccactgcacccgacccaattaccttcttatccagaggaaaggaaaatctcccagtcagttgccatcctcttgaaacctggaggtgtctgttctctgtaactgtttcccctgcctgtacctattatagtgcttactgtataacgagtcctcaatcattgtttacttttatctttttccaggactgataagtgtgttgtgctcaaaaatacttagaaagaattaaataatcacataatctctgagtgaagagggactttgtaggcagctattgcctgtcttccgtgatgtatttaactggcttctaatgcaattaattccattgatgggcagccgtgatgctcagatgctctttattattctgagtggaaacgtccctattttttagcagagtgaggggagaaggtggcccaggccttgtagacatatcctttacccccttctccatcctctctcattacagatgagtctttggctcagcagaatgggcctaggtggagcttgaaattaatgaagagatgctgcttccagctttttgagcaagaagaagtttggcctccagttattacaccttgaggtcagcgggtatctcaagtctgagtagttataaaagtgagctgatgtagaaacaccaccaaagcaacgttttatctaaatatttcagatcccccattataaatcatttattatgattacccttttggtgtcatggaatgagatgatgagcttttcttaatgaagtatttcatagacatattttttccatttatcttggtgttggatgctatgtgacctgaatggcaaatgaggaaatatttgtgcaactcctgaaatgcacacatctccccatgccagagtgcaggagcggacagggctttccctggcagcaataggagcccggtcctgagtagggcctctccagcctgactgcaccatagcaggtgacatctgacttggggtgtgccatgttcccagagctgcttttttaaggagtttggtgggagctggaggaagcatccacatctttaaaaacaaaccttaactcgtgagaagaaaagtggtaaacattcaaacacaatttgaacttttaatttagccttgtgagttcatctatatccatttccaggaaaggtcatgggctgaggtgtggtgcttcactgaaataaatgcactttggagttgacagtaaccaagcaaggccagggaccctgaggagacccctccccacacttgcaatgatcaaacatgctacatcttagaaattggatctgccggtttatggcaacttgacgtaaaatgtgtatctcaggtcaggctgatctgatttaaatatcttagtgttaggcattctctatctgacattgtgaaaacgcatataatggaaccaagattagaatatcaagatgacaagaaggattgtaccttgaagacagtaaaagtcacttgcattctggggttacacatttaatttaaaatagttttattccctgttcctagggtccttgtaactctctcctctgctatatttatattaaataaataattttaaatgagtcaaagtgtcttgctccttggcccactatagaatgtcagtgttccttttcaatatttctacttcttagatcctgccttcaccacaatgggggttcatacagggttggagtaggttgttcttctcaccaagttcccaagcccacataaaatggcagcatcatatttcaccggacccagctctgcagaaagtagtggaaaaaaaagtctgtgatggacttaggacccaaggaggcaaaacagagtttggcttttcccttagggctctgtatatgtcaaagaggaccacacatgggccaagtgacgtgcatattgtgcctgggtgatgctgccccagcttctacccaccatggatgggaccaacaaatgcttcccagctgagaggcagtcacagtgccagggtgatcacaaaattgcccagttggatgaagactacccagaaactggaggataacctcacccactctcagctaccagtagggtcaatagtaagccagaagtgaaagctttctttccattgcctcttactttgtttccccatgtcacagtcagctataccttcctaagccataactctgatcatgccccctgcccccgtttcagacccttcagaagcttcactttgtctctggaatgaactggagcatccgcttctcagcctctgaggccccacgtgcactgcacccgcccttcctcagcctccccatcacatggctctttccaaacccatgggctgagcctgctctcagggcctccatgtgccaccctctgctcagcctcagagtttccacgtgtgtcttagcctcctgttctgtgctgcaataacagaatacctgagaccaggtggtttataaataatggaaatatatttcttacagttctggaggctggaaaatctaagatcaaaatgccaacaggtttggtgtctggtgagggcccactctccacttccaagacgatgccttgaacactgcatcctccagcgtggaggaaacacagttcctcacatgtcagaagaacaaaagaggaaagagagagcccactctcaaaagcccttttgtttaaggtattaaacccaccatgagggaagagcctacatggccttaccacctgttaaaggcttcacctcccaagaccattacattggcaattacatttcaacgtaagttttggaggaaagaaacatttaaaacatagaaacatgtgttgtcctctcagcctggaaccaggtcctcattcttgtctttgtcgttctagatcaaccttcaggcctccacttaagcgagttctgacgtcagtgaatacttctgcagcatggaagtgccaggaccctcgttggcccctgatggccaaatagcctcactctccattagaagagaaagcctcactctccattagaaggccaggagagcgaaatcagggattgctttcaaaacaaacagtgtggcaataaagaatttcagaagaaaataaagaatttaccactgttcagtcatgaacgctcataacaggctggggtgtaggaactgtagttgtcacaaccccttttttgatagagaagggaaattgtccagaattatgcaaagcgtaagtggccaagccagcatttgaactggggcccccactttgctgtgctgtctctcacgccttctgcagggaagtgtccttggataaccttcacccatcttcatacctctcccctccacctaggccaggactacacgctctaataggcccagctccttttgcttcataatgcacagtttgcaatgtcctaatcatcatgacaatgaccgtttccagtgcttcttgcctgctgaatggttaagttcttgtgggcagaggcttgtctgttctccccgctatgcgtgtcccattgcttggcagagtctctgccctgcggtcactgactaggctgagcatttttttcttccactgggtgagcatctcagctgtcctgctagctggggataggctgagggagtgctacttccagatgtcttgtctgaacttcttttttttttctttttcttgagacagggtctcattctgttacccaggctggaatgcagtggtgcaattatggctcactgcagcctagatctcccaggctcaagtgattctcccacctcagcctcccaagtacctgagacccagggtctgctccaagggcctcaaccatgtcagctagtttttgtattttttttgtagagacagggttttcccatgttgcctaggctggtctcaaactcctggccttaagcaatctgccttcctcagcctctcaaagtgttgggaatacaggctgagccatgagctaccacccccagccttgtctgcacttttgagtggctcccttggcagggttctgtgcacgatggcagtggggaacagaagacaggactcctgcctcagagggtgtctgggggtatgggaagagagatgctaaccccacacagtgggcatgagaggcatcagctctgctcagagggcctccctgtgcacaccgaactgctgagtcttctctctgaggatcacacagatgtgagcagagcagtgaggaggcacagaaaaaaagggaaaactgggttccttctgagattctttcttgctacactgtttgtttttaaagcaatccgtgatttggctctcctggccttctaatagagagtgaggctgttttgctacagtatgggctgttgggggacaaataagccatttctgtttgctaacattaaaagaagcttccctgctgaggaggtgctaatgcagctggcagaagctctgtgatgggcatggtaggttagctattaggctgccaggagcaggcagcaatctccctatttagacatttcagaggaggccttccagaggccctgggttcaaatcccagttccacctcttcctagctctgtgagcttagggcgaatctctgtgtcctcacaaacaaatagtgggaaataacacttttccccattgcatttacaggtaagtgtggtggtttgaatgtttgtgttcctttcaaaattcatgctgaaatttaataaccagtctaacaggattaaaagttggggtgcccagaagaagatgattaaattatgagagtggagccctcatggatgggattaggtgcccttataaaagggactgatagagggagtctgtccgctttgcacttctgccctctgccatatgaggacaaagcattcctcccttcagaatgatgcagcagtcaggaggtcccctttgaggcagacactaggcagccaacctgccaggctgtggtcttggacttcctagcctctagaaccatgagaagtaaatgtgtatttgttaaataaataacccagtctgtggtattttgttacagcagtttatgaactagacagcaagttaactgagcctgaacttgggaaacagtttaacacacggttcactcattctcttactttcacccactgggctgagcattgaagatacgcttggtagacacgaggcaaatcttactttaagacagtcttcttctaggacagttcagatacctatgaggccagattcttcttttcacccttgcataagcccttttgagcaacttgctggatcccaactccaattcctttctcttgtggaagacacctggcattttcactggcgagcatccatcctccctctgcaatactttctttttttaactagtggaactaaggaaacattacattttttacgtctccaattcatgtgcacaaacacggcatccatggtgaaggacacattgtggatgcttttctaagttctttcatatgactggtaatacatggggaagactgctgggcccacggtgggcctccctgctcccctagactgagccactcaaagcagatctccacttctctgcatcattataacagccttttaactgatctttgggcaagtgacagagtcatgtccttcaaattggcagaaataaccggaaagtattctgtctcttctactggaggcttcttagctggtgaattggaaacctggcactcctggatgccaccgtgtgaccagagccagcctgagaaagaagccacagaaggaagcagagggagagatggagagacggcatttggggtcctggcgttagacccacctctcaatttcacagctacatgagcacctagattgccttgtttgattagctagtttcaggctgacatttaacttttaacccaaagtgtcctaatacatctttttcactcattcctttgttgcttaattagtaagttttaccctctctaagagtctatcctggatgtatgtcaaagtcggggggatgaagacactgccctgcctttggggaacttgtcttcttgtggataaggcatggtcaggccccaatcagcatagcagaaagcaccatgagtaagtgtcccggggctaatgtagaaaataatgaatctgggaggccaaacaggtgaatgggtgagagtctttcagactgcggagtgaatgagggcctgtgcaggaggtcacagtggagcagaggctccttccagagcccccagctgggccaattcagtgcctgtgcactgctcaactgagatgttaccacatcctccttctcccagccctgggatccagaaacccaacacccagtaatttccaggaatctgatggcaatcagctgggcaaggaatcactcagttccagaaacaggcagtgtcaaaaaggagattcaggctgggcacggtggctcatgcctataatcccagcactttggagtgggcaagaccggcagattacttgagctcaggagtttgagaccagcctgggcaactcggcaagactccatctctacaaaaattagccgggcatggtggctcatgtgtgaagattcagtgttagaatagcaagttaaactttgatggtagttctggatgtttgcctcccacttctgctccaacaggaaggtagtcaagattgcatggggcagactttgaattagacagtaagctttctgaggacagggccaattccttctcctttctctcctgtgtacctaacattaggacatacacatgtgcatgcactaaaaatatttaataaagatttgctgactcattttctaaaaacctctttgtgatatttctcaaaatattataaaccagagaaatatagtaaaccagagatacgaaatgaaaaagaaaatatactttcagtgtatttccagatgtggattgttagaagagagatcgtatagcatattggttcagcctggtgccagatgttctgggtttaaattctcacttcttcatttacttgatatgtgaccttaggcaagttactacatctctctcagcctacatttcccccttgctaagatggggacagtcaataggccctgtccggtgaaattgcagtgtggatcatgaggcaatgcgcaaagtgctgagagcagcacctggcccatgataaccatcacgcatgtgtcagttgttgctgtcattattgctattgaaagggagagagagagtgtgttattaaagatggaacccaggagcaccaagattccatgttctaaataacagctctcatagacctagggaagcattaattcatagaatgaaactaggaagtctctctgatcaacctttcacagtgagaaaactgaggcacagagagggaaagtgtcttacccaaagtcacatagcaaaatagcagctgaccctaagaaaatgccagagctccttatatccagtctagaattctttctgcttctgttcttcttcttctttttttttcttttctttttttgagactgagtctcaatctgtcacccaggctggagtgcagtggcatgatctcggctcattgcaacctctgcctcccaggttcaggtgattctcctgcctcagcctccctagtagttgggactataggtgcgtgccatcacaccaaactaagttttttgtatttttagtagagacaaggtttcaccatgttggccaggctggtctcgaatgcctgacctcaggtgatctgcctcccaaagtgctgggattaaaggcctgagccaccgcgcccatcccctgcttctattcttaactcttgggtctgactattgaccaaacatgtatagatgcaaaagccacacctcccaatggaaatctggacctaaatcccatagtgggctcttccctaggagggtgacatgcacaagagacagaccaagaaaagcaccagggctgcagcaggcgagggagtaatttccagcagcaaataaatctgcccattgccgaaggtcattcccgcgttcccttggaaaatgtgcactttgtgtttatgcagctttgaggcaattatttcacaagaaagaaaatctcttgatcacattacttaatgttttctaagtgaacatttggtatttagcggctaagcaaatttacttttctataatgaacagagagtggatgattgaaaaacatttaatatactgaggtgtgggtactgctgtctaaaggattacttaactcacagtttaaactctcattttttttttgaaaagcaaacagatttcctttatactggagagttggggattaactgttttgttcccattaaaatctgactaaatacatgaattgtgtgtttttgcttatgagctcttgggggatatacggatatacttttgtcaatattgaatagccttaccattttgtcaggatttcccattggtacatgcctgctggatggagagtcagttggtaagtgctactgatttagacaaaatcctagactgctagaattgcattcaggttataagagtttttaacattgagactacataaatgcatattaacattgtattcatggaaagcaacaggaacaaaccgtggttctcttcacaactagcaaacaaagaatttattcaaagagaatggagtgggaagaagagcttgaacaaccaggaaggtgaaggaacagggacaggacagcagcgagactctcagccgtcaaaagtttacggactttctgcgagattcacgtacagtgactttaagtccttgtgtctccttgttttaaatttcaaattcataagagagaaagttggagtggcccagctggaggcaggtacttgccaatgaattgatgagctaagaccagagaggcagggccatgcaactgtgtaattgctggggccattccaaggagaggagttgattgtgagttaggcagcaatccccaacatgcattcattgagccaggatggaaatgtcagcaaaaaccaagttgttttccttctttgacagacactgtcagtgtctcatcaacccctcccgcccatcacccttctgcactccctattccaggcacgcccatgagtccctgcttgcttctttccttggagatcaacatttagatttctcatccctcagatgcaaagaccccaagtggcttctacatcaagtcccataattccccagggcagtgaagcccccagttccctagtggtccccagcagtaacctgctccttagtgtccttcctttcttcttccacttccccatcccctacctgtgccatctgggatcacgtcccaagaaaaccacctgccccctaatccttgtttcagcatctgctcctgagagagtccagcctaagacacattctctctagaggcaaacaccaatgtgcttataactgatggctgctctcttttaatggacttaacagcagcctcactgcagagggagtctggccgtcccctggttttccagcttcagcatgactagggaagggtctggtggtgaagaaatgcccgtgcgccatgcctggccagggagagggtcacaatttttctcgtttggaaaaaggctgactgcgctgctcacagccagttttcagcttagcgtcagcttcgtggattgttttgggtctgtggatgttgcctttccaactgcataatgagctgcttgaagccagggatcacatcttcccttctgtttgtttctcccactgtacaaaacagaggggcggatacactgaagatgctcggaagagatgtgttgcttaattaaagaaccgaaagaggaacaggcataaccatttcattttctaggccgggggtggggggctctgctcgtggagtatggtgatggtccgtggagttttgagtgggctgttgcaggcaccctcagagacgttcccttttccctttagcactcactgtgtgcaaaccaaaggcttcttacagcaaataccagtggctccacactcaatcttgcacacagggcagacaacaagagccagggagtaaatgtaccttggaacagctctccaccagccaccactgggatatggcgggtgagcactccagcttctttgccccgcggctagaacaattctgaaacgtgtttcacagcatgcaccaaatccaacaggattaaactccattttcccgcaaggcaagctgctctaacacaccctgcattggttttctttcctctccatctcccagctccctgctcctcactcagtgctccctggagtcgctcctggcccccacatcttcatcacgaggtctgcttctggtttaatctgagataaagggaaactggtttctgcaggtgcggaaagttccttcagagcccaggaaatgattaagggagacttagtgtcagtatccatttactttaggttaaattcatttcctatgtggaccaatttctgatagaagcctctccttttttgttgttgattttgtttgtttttcatcctccagtacgtgcatgcttcccttcatgcagaacattcttttacaagacagacagtatttccccaggctggtgtaaattattatcgaacaatgaagccccttctctagtcatcattccggtgccacctggccaggctcagataaatggcctattctggaggtgcaggaaaccggatgaatcatgacgttatcccaggaacatggcagcccggcagccgggggatggagtatctgtaagtgtggccccatggaagctcctgcaggacagagcttcaccattattaaaatccatcctattgccaagtccgggaaacactgtaggcacaggaccagtggcccaggtctgggtttagaagataacattttcctcatggcctttttccaaatacctaagtttcatgatgaacaggccatccagaatccagttagtagggaaacaagtggcttacgtttcctaattttacatttagtctgttggtattaaaactcatgtgctgaactgggcattgctgctattaacctctttctcaagttgatattagatcagttttcaaatggagactctatttggagatggtcttgtatatgtttaggttattttacagccacaaagcctcaaatggcttcacttaacaggagttcttaaactttggagataactttgagatttgataaaaggctggtccgcttcccccagaccaatatcattaggtccacagtcaacattttgcatacagatatagtgggtagaccctcagagcccatccattgagtcactagggacttctggatctccagcaaagacagctgttggttgtgactggttagtgactgtggtaatcttgggggtgaagctccagcctgagtcatccttctgatgaccgggacgaatagtatgtctgatgataaacattgcatgtatgaggacgctgtgtgaagaatgccatacgccggtctataggaaaatccatcatgaagtgtttggggatagatactagacttgaacagtgcgtctaatgcatcttcgttctgaccacatggactacttaaaaacgttaaattcaagaagtggaattttgaatttaataactgtaggtattaatgtttcgtaagttagaaggatgttggtaccaccaattgcatttaattgtcttctgtgtttgctgttataatttatgtttatttttcttcaaaactgataatgtaatacaatagtaagttgtatataccttgaatatagcattggacagtatagattgttatataaaaataacattaaatttatctataaatctataaccccctattcagaggctaacacttcaaatagtttgatatttttcttctcatttcctctgcatatatgtatacagtttttattacttagcttaatatattatttgtttttacctatcatcagatgttatttttaaagtcatctttgaagatttagtaaattctctgactggaaccattcttctattgttggggcttttgaagttcacaatttctcactcttttttttttttttttgagaccgagttttgctctgtcacctgggctctctgcaacctctgcctcccaggttcaagcgattcccccacctcagcctcctgagtagctgagattacaggcactggccacgatgcccggctaatgtttgtatttttatttgtagagacagggtttcaccatgttggccaggctggtctcaaactcctgacctcagacgatccacccccccttggcctcccaaagtgctgggattacaggcttgagccaccgcacctggccacaatttctcactttttctattacgcttgatacccaaactcttttctgttcctccacgatgctctgacatgatcctaagcttcctgaggtcacctcccaagaaaatcacctgccctcaaatcctgggcaatccagtggcttatcagagaatgtattttttttccccaaacaagcatggtctttccttggaaagactgatggtgagtaattttctcttgctctttacaaatgctctgtctcatttaaccttcacaacaacccagggaggcaggtaccactttccccatgtggcaggtgaggaagctgagctcagaggggtcactgcctttcccacagccacgtgtggagtgagcgggatttgctctcagctctgccttggctgagtcctgtcttctcgccagcgcttctcgactgccctggtctgggtgccccaccactaccctctgtgagtccgtgggtagttgattcctttcctcaaggatctactttctcaccgccccttccatgtggaagttttagaaaccttgggctactttaaacaaagagccgctggctgactgctccctgcccagagggcaaatcccggtttcggagttgagatagacaattatgtaaaatgaattctgggtgcacccagttgtctaattaatgacacattatctatgtaggagaaaatgtatcttttggggctcagctcagactctacatctctcctcctgggcctccttgatgaaattaattggggcaggcagggggaaattgacattttagaagccagttttcattcttggactgaaagaaactgttccagtgcctgtttacctgggctgcaacacacacacacatgcacacacacatacacacacatgcacacacagatgacatgagcccctgaagttgctgtaatctaggaggccacagtccagagcaattgcattgaaagcagccacccatctcaacattgcagccgacgagagtgaaatcagggaacacattccaggtccaggcaatgaaggagaaaatgtgccagctcttgccacagccgttacttacaaaggttttccacctgtaatgtatttcccaatgctgtgtttctctgatgctggctctgcctacacccacaaagcaagataagagggaaagtggtggctggacacagtggctcacatctgtaatctcgacactttgagaggctgaggaaggaggatgccttgaggcccggagttcgacaatatagcaagaccccatctctacaagatatttaaaaattatctggacatagtggtgtgcatctgtagtctcagttacttgagaggctgaggtgggaagatcccttgagctggggaggttgaggctgcagtgagccaagattacaccattgcactgcagcctgactgacagagtgagaccttgtctatatttaataaagaaaaaaggaaagcagagccttggacatggcttggcctagtacacacctgtctccttggtgcattcatcctatggagcccagggggtcttgagctgtgaacttgtgagggttggacagagaccccaagcctctgctgctttattgtgaatacaatttgcattactagattatgctccaggcatcgttacaactacttgcagatattaactcatttaatcctcactgatgtccacatcctggtttatcaatgaggagacagccatggggaggttaagtatagtgtgctcaggtcacattgtctgggcatggtggggtcgtcagtgagtgtcttgctctgacttggaagggaagtaaggagtttcccgaggttcctcttgctcaactgcaccctccctcaccgctcacctctccagggttccgatttaccaacagacaccctcagggcacagcttgggagtcattcggacaaatgaatgctcaactgagaaatgggtagaaacaccaaatacatgctgaataccagctctatgcagatattgagctagacgcttctctcaacatggctcatgtagccctgctaaaaacacagcgggaagggggaagaacgaaagtaatgcatatagaccatgctacgcattccatcctatataagcgaactaacttcttagcctatgctagggttggtgaaccatgacctacaggccaagtctggcctgtcacctgtcatgtgagtaaagtttcattggaatccagccacagctgctcagttatggttgtctatggctgctttcacactgcagtgtgggatagagacctcatagacagcaaaacctaaaacatttactgtttggttctttacaataaaatgacccctgatttatgcagtccttataacaactttgcaaggtgggtataattttggagatgggaaaactgaagttcagggaattcgaagggttagtttgagaccacccagaccatggcaaaaccgtgacttacacctgcaagtggttgcttctcttgctgaatgatagggtgacacagcagcccagtgtccctcagggagtcggggggatggccccgctgtgttccagggagagggagggactctggagctgctgcactctgatctgcctgttccctcggctcggctggctcagccactgtgtcttgtcttgctctctccaagagcacagttgaccttccctacagctggcttgctaaaaccgtctgacatgggaacaacaatacattctatcacattcagcacaagaaatgagaggccacacaattacttcaagaatgaccaagaagaaagaagtgattaaatttttggcccccactttttttcctccccgagatgatggcgttgattttgagttatctccctaaatggctcgtttgtgggaacttccccaggctaatctgaagaagggcgatgattgcaggcagaagcgagtccttgccctgcagcaagatctcacacctcacatcctgatgtgggccgcagggagtcccagcatctctgagaccgtaggcacgaagctcaactcctccatcacctgctcctcttgccggacacag[450 bp omitted]tggcaatttcagtcctttaaaattattattttagaaagattcaaggtctttctcataataatacctttcatactacttttatctatctaatttttcaaagaaaagaaagttggatttagagaaagttctccagggtatgcactgttttgggatgagctatcccacacccaggtgtggcccccagtgcagatgtatttgctcctattgacaaagtaacaagtcacagcagtattctccctccaacctttgaatgtcagcaaaacatacctgcctgcaagtgtcccctgttgtgaatgccaggccccccagtccccggccccaagctcctcatcagcctcctgccttgcatcttccttccagacaccctggcctaggacagacacaagccagccagctctctccctgcctcccctgccccagcgcttcacacttgtgccccttcacaactggtgtcatgattaccttccagctgtgtgcttatttatctacattgtctaaataaagtctgcgttatcatgggtgtgatatgttagattcctatttttctaagatacaggaaaataagcgcatagcctctgacatgtgtctgtgtcgtatcagatgtcatctctgggctgcccactttggctgacatggctctggcccagctggtgctgctccttggccacggagctgtctccacttcctccacaggtcggggccttctaagacagccgttctgggccctcagtggctcacaagcccaccctaagagcatctcgccccctcctgctgtgcatatctctggttcctgccctggagtttccccgttgctgtggaagtgtgagatactgagaagtccacccacagtgcccacaccagcccccagggatggagtgttggggcgttacaccccatagagtgaaatttggatgagtgggaaacaggggcctatggctgaatccttccccttcctatcccactccccagcctctatgctgtgttgggacccagcagttcccctggcctccctaaagacttgctaagatactgagcagtccacttgtgacaaagcctcaccctactcatgatattctcaccaaacacgagcaaggcagacacagctcccctctgcctgcctcactttgctttcctgggactgcactcgacagcaaagtgtcagtaaagtcagcttctgcctcaagttctgctttctagggaacccagaccgcaacaaatgcgcagcctaaaatcatctcccagcccaccagggtacacaccacccttcgccaggtacacccatggcctttcccattgcttcatggtattatcccatcaaggctgctaccctgggggccaccgttcccggacctgcagctcctctcttccaccatttctgaggtggctcccaagcctccttccctctagcctggaagggacccacctcagggtccctgtggtcccaactctgcacttccctaggggcctcaaccctttctttcttgtatgtagatagtcacagtccatgccatcctcctctgatagatgtggtcctctctatggcagggactctttgagcctcattgctttctgctccacagacattggtagaggaagaaatgagttaccaagaggagaaaagtgttcatgtgtgtataacaaggggccatgtgatttaaaactgcaccaacctatccaggaagatgggttctctcaactggattagaatgtgatggatgttgatctgcccaggtgagcctaagccaatcttgagagcagctgtctcaggccaggctgccctgggagcagaccacaaacaagggaggagtgtagttggtttacctggaaggcgattcccggaagtaccattagggttctgggaagcaggaaaagcggggatgaggagctaattggaattgagttgtcggcatgtttgggttagggcatgggtctctggcctgaatcccactggagaatgttgagagtcagtgtggaacacagcacaaggtggtcacagccaaggagtgaggattctcggggtatccacctgtcggctttcctccagcattggtgagggctgcttctgacgtgtgcaagaatggccagaaacaaaaacccctgggaggtggagttgcagatgttgactgtcggcgactctgacttcatggaggtgcagtgggaaaccaacaatctccgcctcattagggctccacctccttcattgccatctcatggtgcacacagagttcggcaaaggagaaccccagctctcagaagccttgctgcatacccaagcgaaccactgtaggcatccaggatgcaaacacttctctgcttgatgctgaactagcttgccttaggagcagcccagcgtgaaatcccctcctttgctgagacaggctcacacgttcttccactacacatgcctgctgccttttcttcagctccatggagaacgctctgggcaccaaggcctaacttctcagcctcagcttaccaaaggcatatgtggttttgctaatttctaaagaagaaaaaccaccctgcttcccttggagccctaatagcaccaagacccggcaagatgaaggccccctgtctctctgcagagctgccatcccctgctgggctgtgcagtgacagtggcagctgggcgaatttcctccttgctgttctgaaacagaaattcattctgtctccaggccaagccctcagctcactcactgaacaccccgaccccctgcaagagctccaaagtcagaattgcatttagcttagggtgtcaaagccctgcactgagccttggaacacttcagtttcctcctgtcaggaaagagcaccaggaaaagaagaagggcccccagagatccgtaactggggctgatctgagctctcagggaaacgggcttgagagtctggggtttgtgtaggatgtttcaggaaagcagttcttgtgtgcacagcttcagggttgcctggcatttcatgtgacaatcaccgtgttgggactgaaatgatgtccctgccccttcttaactataggcagccaggaggacaatgttgaccaggttatgccagacattacctgtagaatagactaatgtgtttttctcagagttgtactgggccctaccctcaggctaaagaggtttcagaaatgatgatcagatggcttaggccgaaggttggagacacatgacacaggtgcagttaccacgctgctcttccccggggcagacatcaccaatcaatcctgagcctggaaacggcctttccagctcacccttctgggcagccatgactgtaagtcaggttacgcacacaagctcagctgggtccctggtgtgtttctcattgaaactggcacctgtagtgagtgccacgggacctggacagcacccctgacctgcacagcctctttctcacatatgccacacatgtgtattcatgagaattcactcactggttcattggataaatgcagtttattaaacatttactgtgtgccagggattatgctcagatgatgaggattcaaagggagtaaacacaagaccagagctgctccctgggagaagcctgcatagcccagcctcatgactgaaggtaaagtgctctgtctacaggcccagggcacaccaggcatgtcacagccaccctctgagcaagcagaagcccagagagagagggcatgagtgcagggaggagaaaggagaaagccagcagagatggattgagccaaatcatatgttctttatgacatcttgtttcccagacacttcccaggcaagctccaagatcttcaaggaggaaagggacaaactggcccttgttgggaggagtgagcaggctggccacccctgtctccccagcccaccctcactcttggggggagcagcacaggtctattcatacatggggtgatgtgatctctggatcaagggtcaacacctgcacaagggcagccatccagaggccagcagcctaggaagggccccaccaggggctctgaccaacttggggaggagttgacccatccatagctctggagcctgcacctgagcttacaaaaaggactggccagctggagtatgagaggcatataccagccatgagagagggagagtgagcagctgcacccaaaacaagtcccctccagaaggtcttctggcgtgcctccagtgggcctgtgtcctcctaattaccttcttgctttcttcttcttttttcttcttcttcttcttcttcttttttttttttttttgacagagtcttgctctgtcgccaggctggcatgcagcggtgtgatcatggctcactgcaacctccgcctctggggttcaagtgattcccctgcctcagcctcctgagtagctgggactacaggcatgcaccaccatgcccagctaattttttgtattttagtagagatggggtttcaccacattggccaggatggtcttgatctcctgacctcgtcatctgcctgccttggcctcccaaagtgctgggattacaggtgtgagccactgcaccctgccactttcttcttaaagagtctcactcactgttaccataggaatctcccagtaactgggatgatgagcccaggaaccaattaataggggtcattgctcaaggatccaggacttttactcaggacaggagggtggcaacctggcacttggcaaaggaaagaaatgagatgaatggagagaaaaggaggggccagtgcataaactgcacactgggctgggctctctacacccatcccctcacagtattctgaaaataggcttgcgaagtgggtgtatataagtgctattcctttacttcaagaaatgaggcttagtgagccacatcatttattcatgctccgtggctgatctgggatgcaaattcagtggatggcttcagatcagaaggaatccagctgctgtggttcaatgctctccctgatctgcacagctcattctgccttctgtggctcccacagcccctgaaaccaagcctcgtgtctagaagatgccccgtaaatgtccaaggaaaggaagaaggaagaagaggcaagcactttgggtagggaaaagccagagggaaggaagagcagacagcccagtacctggagtctcttatcatggcaagagtgggttcccagggagctttaccttgccctgtggagaggcccgccatcggggctccccccacattccctggcccctgtcaccctctggaacacacccactcggtgcatgcccactcccctcagcctccttgggtctctgtgccagctgccctgactgaccttgtttgcctgcactgagggctaaaaatgcctcaggagttacatcaccccaggatcagccaccactaacaaaggggggggtaggtgtaaatgtccccttgcttctttttaattgttttttcttttttcattgttgtttgtttttgtttgcttgttcttgagacaaggtctcacactgtcacccaggctggagtgcagtggcgttatcacagctcactgcagtcttgacctcctgggctgaagtaatccccccacttcagcctctccaactacaggtgcatgtcccaaagcctggctaattgttttttattttttttgtagagacagggtcttgccatgttgctcaggctggtctcaaactcctgtcctcaagtgatcctcccacctcagcctcctcaagtgctgggattacgagtgtgagccacggcgcccggcccccttgcctctgatcaggctagctctctaaaccttccagagctccctcttggggccaagccagcaccccctggggcctgttcttgatgctgcatccttgggtgccattttcctctctgccccactttctcactcttctattagtcatttctgaataattgtgttcacacagatccatattttcagttctttttctaggaaatccatcctaagatgagaatctcatcagaaacttcccttccaggcctgaagccttccagtagcctctttgtggacatgtcagagctttggtagagtctgaggctcaagttcaaatcctgagcaaggtcttaaatattcctgctcagccggattcaccctttgggatgtgagtactagtggtaagtctcgaattttttaaggattttgctcaaaatctttttagggagttgccaaaatgccccaaccaaagcaccttattacctgtcttggaaaattccaatcagggagatttgggataaagtagacatcaaaataaagcttttatgagtagaagaattataacatattcagcattgttttagcccatccagaatgccagacactgtgaagttctatttgtgagctaccatttattcctgccacaaccctgtgaagaatgaatgatcatatttctcttccctctcacaaatgaagaggagactggagtcaaagccttaagaaatccatcttagcacacctagagtccagtgaaagagagaggctggcggctggcatggtctctcttcctggagtgggcaatggccattagcaagacctggaagaagttagcaagttctcccaggagtggctggttcagatgccctgcctttcaggccaggctgaagcaagaggcagaaacactggttgatgaggagtcaaggactgccattcaccaaccagtgcaaaaccccgtgtgctcagaagcccctcctgggacctgaccttccacctcggtaaggacagaaacgatttggtaaggtacatccaccttggagaaggctggatttgcttactcgaaaccagagagcaattccaatttgagtgaagaggaccacctgagtggggtgaggaataagtgcgagccagcacagagtgagcaccaacagcatgaaggaggctcaggtagctccatttcctggcactgactgtatgctgggcgtcacgctctgtcctttctctcatctaatcctcagggtggccctacagggatgttctgctctcatccctgttggagtgtcaggaagggttagggaagatgaggcccttccccaaggtcacgggctcctaagtggaggctgtgggatgggacctcagctgcccctgactggactctcagccgctgtgctgcactagtcatgacaggtttccaggagcccacagaacctcagctggggaaggggctctctcggggtggggcctgtgatgaccttgaccctgtctgcagagaagaggagaacgggagaggcgtgactcatcccctgccagtatggccggactcacaggcagccttgcctctctggctctcttgggacgggccactgccatggtgtcaggattgccactttcctgtcctcatcactgctgctgttaataacacacgaataattcaagccataaactttgaggcacaggctcctctctggccctgggggagctgccaaagatagctcaggctcggcagccccgcagcatggggcgagtgagagaagcgtgtgggggaagcgcttgtccctccaggctaggctctctcagtgcttccagatgcactcagggcctcctttcctccacggcaaggcccctcatgccgtcagcccgtgggcaggaggaacagcgctgggcggcattgacgttctgtgttaaagcctagaagaggagctctcttcctttttcttcccatagggcatctgtctgggaagcaatggttgggcctggagggatctctggggacatccttcctcatgagctgggcgtagaagaccaggtgttcaccagagaagaaaagccctggcagcaatcctgggtggtgctgggtggtccctgtggctgctcctggccagctctgagagaaatcatttagcagaaatggtgctttttccacccaaaatgttgtggggggcccaggaagggctaaatctgcaactcgaccaagaggccctccaaagaggtgtgggttttttgtgctcccagtgagcagcctgttgctgggtgacaagccagctgggctcccaggactactccaagttgtatccctcaaagttccacattttaggagacttctctgactcggacaaagcaggatggggagcccagagccagtgggggctcatgaatgagatgtccagaaaaaagctgttcttcaagaaagattttaactttaattaattaatttattcattcattcatttatttcaagacagagtctttctctgttgcccaggctggagtgcagtggtacaatctcggctcactgcaacctctgcctcccaggtttaagcggttctccagtctcagcctcccgagtagctgggattacaggcccacgcctccacgcccgactaatttttgtatttttagtagagatggggtttcaccgtattggccaggctggtctcgaactcctgacctcgtgatctgcccacctcagcctcctgaagtgctgggattacaggcatgagccaccacgcccagcagattttaattttaaatcttgaaacacaacaaaccccagccatcctccatgcctgtggggtgcatgaggtggatcctcacacactgcaccagaagcatgactggcagcaacaggcagcttagaaatgtctgatcatttcacccagaagctttctcctgtggcttcttaagaagttataagaaactgtggcacaaatcttagtattacaatgttctcctcttcctcacatattataaaaaaataaaaacaaaaacaaacaaacaaaaaaaccaagggaaacagatcactgatcaaaatacacaatgattaaaatcattgtcctttgaccatgcacagtgactgatgactggagtcccagcactttggaaggcagaggtaggaggatcacttgaggccaggagtttgagaccagtctgggcaacatagcaagacgctgtctttacaaaaaaaaaatgttttaaatagctgggtgtggtgtgcacctgtagtcccacttacttggcaggctgaggtgggagggtcgcttgagcctaggagtttgaggctgcaatgagccatgatctcaccactgcactccagcttgggtgacagagcaagaccttgtctcaaaaataaagaaagaaatagatctaagtctttcattcctgggcagtattttccagcaaagaattaccttgttctgtatgcctgtatcttttctttttcctgtcactgaatcaactgtacatatggtataatcctaaatttgtaaacaaatattaaaaatatgcacataaacctgtttacatgtcagaaaaaagactagaacaaaatatacaaaaaagagatgactttgacattttaagagacatcacatcttttttttttttttttttgagatggagtttcactctgtcacctgggctgaagtacagtggtgtgatctcggttcactgcaacctctgcctcccaggttcaagcgattctcctgcctcagcctcctgagtagctggcattacaggcgcccaccaccacacccggctaatttttgcatttttagtagagacagggtttcaccatgttggccaggctggtctcaaattcctgacctcaggtgatccacctgccttggcctcccaaagtgctgggattacaggcatgagccactgcccctggcccctttttctgttttataatgtaagcaatattgaaattccagtggaaaaaaattctctttaaagttaaaaaattctaatttcgagctaaagaaaactgagaacaataacaaatatcaataccaccaaaaatttctaaaacaattacagtttctggagtgctatggctcatgtgacagtgagaggacatggagcaggcattatcatctccaattcacaaaggaagaaacccagaggccgtgtggctccctccgtgacaacagctcacaggtgagacctcgtgggccgacctcaggcctcctggcatctagcccgtgctctctgtgatctgagttgcctttttagacttctagggcagtcgctccttctctaaaaatcagctagaagctcccctgagtgataacgggttgagtttgcctagcacagccctaatttttgcctatttttctggcatacttagtagtaccctttttactctcagaaatagtccaatgaggaaaataaaatgcctggcctccttttcaaggcatattaacctcttcatgtttctgtcggaatttcacaaagccaccctcctggggccaggagtggaggcccgcgagctcccgccccacgcctggtgggtgcagtctccagctttgcgctttgtttgtcattctgaacagctctgctcccatcagctggggctctgtgaatcagagacgctgcaaagagcagcactcccaggagctcagatgaaatgcgactgagggcaactcctcccagccacagacagctgctctgcagggaggctcagcagcgcccagcaaagtgcctgctgtgcactgaaagatcctcaatgggccctgattttccgtttgtcctttcagcagtcacacattcaacacattgttgaggagcagctaagcgccagtcttgggcacagattaaagaacaagaaagaaaatgccgctgtgcttacggtactaatattctagtggggattcaggcaacgcacaagaaatgcacatgaatacatacaaaaatagacaggtgctatgataacacagaatggtggtaggtcggcttcaaatggtgcagtcagggaaggactccggggagggaattctatggtgaactccaaacgggaggaaaaggtgggcctggaaggatttgggctggaagagagccccactctcccaggaatgtcaagggcaaaggccctggggtgggacaagcttctgcgcatttgaggaggatggaaaggaagctgggtggctgacctgtggagtgagaggctggagggtcagtccaggcagcgcacaagggggattgcgaggatttgggactcagctctgactgcagttaagaaatatttgagctgctaagtgataagccttggcgtcatccacacagtgttaattctgcaggcgtgcagatctcaagagtggtgggggctttcctcgtgggtcaccaggcggaaacctgccgcaagggtggagccccccacagagagccccttctagggcaattccaaacagaaaggtggggtcagagctgccacagagtccccactagggtaatgcctagtggagccatgggagggggtccacttcagggacccccagactgcagagcagccagcttgcagcatctcatgggaaagattccagcccatgggcgcaggaacatggagtccatcaaagccatgatggggtgcgggggtgcagggtgctgcccgagtccttgggggcccaaacctcccaaagtgcattggatgctggactgggagtgaaaacaggtgattctccagcttcgagatttagtgtctgccctgctgggttttggacttgcttgggctcgtcactctcttcttcttgactatctctgccttttggggtggggataccctgccctattcccatcccagcattgtgtcttggaagcagatgccttgtatgatttcacaggctcacagtaggaggatttgcctctggatgaattgaaccttgaatctcacgcacatcagattcagatgggactctggacttagcactttcaacttaatgctggaataaattagaacttttgggcaggctgccatggctcatacatgtaaccccagcactttgggaggccaaggtgggaggatcacttcagcctaggggttcagcatcaacttgggcaacctagtgagaccctgtctctacaaaaaataaaaaaaaaatagcagggcatggtgacatgtttctgtagtcccagctgcttaggaggccaagggaggaggattgcttgagcccaggtatttgaggttacagtgagctatgattgtgacactgcactccagcctgggcaacagagtgagaccactttttttgttgtttgtttgctttgtttgtttgtttgtttggctttggaagtactgagatggagtgaatctattttgtatgtgagaaggacgtgagttgtgggcggccggggcagaaggctgtggtttgaatgccccctccaagtctcatgtgcacacataatcctcactgtaaccatgctgagaggcaggacctctgagcggcaattaggactagatgaggttatcagggtagagcccccatgatgagtctgggactttataagaagaggaagagatgtctaagctggcacactcagcccccttgctgtgtgaaggcctgtgccacctcaggactctgcagagaggccccaccagcacgaagaccctccccagaggccgctcctccgccttgaacttcccagcttccagaaatgtaagaaatacatctcttttctttattgaaagaaagaaatatttgcagtgctgagtgccatgagcaggtcccctggttcctctaaggaggacacacagaaggagagaaggcatgagtgtggcagaagatgaccgggagaagaatgcaggggctgggagcgccttatgcaagaggggctgcagtctagatagagaagtgtggtgtcaaggctaagtttgaaatctgaatacagtttgcacattaaaacaaaaaagacagggttgtctaggctggtggaaattgggagggaggagcagaaaaaaataaccaaggagtacatttcaccattagtttaagtgagtggtagatggtgtgccattctctgagatgtgataaaaagggaggtaaaggtttgggggttggggtgtcctggcactgagggagggactacagaagctgtgtttcagacatggtattctgaggtgtctctaaaacatctgagtacagatgtcaaagagacggtcagatatgcaaggctggagctcacggctaaggtcttggctagaggcataaacgtgaaaagcatttgcatatgttgaaggcaagatggtaaaactcctcaagaataagaaagtagtcactagtgtcaaaaatttgcagagggaaaaaatataaggacattttgctttttgtccatacatttggccaaagtaaaggtgattggtgacattgatgaagcagttttcatggagctatagggcaaggttcacattgtggacacggagagccctttatcagtacagcggccaactaaataaataaaaattattgctaaggcttattccaaaacaaactcccaataatgctggataaaatgcataaaacaaaccaagttttcaaatgcataaattagcacacaacaataagacaaatatccagaaaataaaactagggcagaaactaaaactaaagttataaccatgacctgccagtctccccagccagtgagcttaggttttcatggcttctgggagatgaagccatgggcctgagagagctgggcagttggagctaagattttctcctgcccaccccacagaaagccaggagctctggaggggtgccatccccatgaaagaatggctagaaacactgaggccactacacagagagagaatagagaagcctgtcctccttgacgtaggctccaggacatggtaatgttttaaagtggtatccaccatacggttaaggaaaacagcctctggcccctagccgcgacaccatgaaatatgtatggcttccttctctgttcatcccctctccgtcagatctcccctgggaacacagaattattatccctgaatcacatgagacctttccattctccaaagctatggagaaagctacctcaaatgtcaatgtccgcatatccagtgtcagagttcaggctcacctctccttcaaggtgtccagctgaacaaacagcctttcactccaacactttcatcccaaaccatggcaatgtgaatataatttttaaaaaagcaagccaagcccaaacaaattctatgtttataccttcctccttttttggttaacctctactaagggacccaatagtgttacttttgcatgagaatctgagtttataataaaatagttctgctatgctcacagtctttctagtctttgtagttctaaattatgaatccctgaggagcttggctgggagataatctacataacagacagcacactccatcagaatttctcctataaaacaaccaagatcacggagtgttcttactgggtgatcttgccatgcctggctccctctcccctatagtggggactctagcagaaagattcttggaaccttgaaaaatggccacgtagggagcccggctaccagtttaccagttgtacttggattgcagctgtgcacagtgcttaggctcaggccccattcatactaagaattcctttattccatcatacaggagctcaagagcacatttaagtttactttattcatttacaatttgtattctgtttatttatttactttgagatggagtctcgctctgtcacccaggctggagtgcagtggcacgatcttggctcactgcaacctctgcctcctgggttcaagcaattctcctgcctcagccttttgaatagctgggattacaggcgttcaccaccatgcctggctaatttctgtatttttagtagagacagagtttcaccatgctggccaggctggtctcaaactcctgacctcgtaatccgtcccccttggcctcccaaagtgctcagattacaggtgtgagccaccatgcctggcctgtattctacttattttttaaaagatgagattaactcaaaattacataaatgtattaaatatgtttttaatctctcaaataatgacataagctatatatgctatatatatatatgtcattggtttgagagattaaatatatttaaaagcagaattacagttgagagattgagatcatttctgtaattgtacactaaatataacacagcacttcctggtagccaaggcaaaatcagaaacaagttcagttgcctggctctttttttatcttatcaaaggaagcatacctgttgtttaaaagaaagacttgataataagtatgaaaacattaatatcaccagagaaaataaagcaatttttaaaggtaatgcatgttaaagataaggcattatgtatataaaatgcgtaaattttgtatatgttgcttatgcctggaaccccaacgacaatcttccagttgtgtcgatgaaattgttcttgttgcatttcagtagcttcaggttcccggagggagaatgtgaatattcatttatttatgacttccttgggacactgctaaaataaaaattatctgttgaaaaaggagtaaacagcaaagagaaaaaggcaatcacaaataaaattatcatcaaattttagaagacaaatagttttacgtaacaagttcatgaatgaaatggacagagaaagctgcattttagaaaagcaactggactgtagaggagatgaaagccagtctgtcgtccagcaccccagacaagactgggctcagggtccttcaggagtggctgggatcaagagaattcttagaagtctgcagtagtacaccagcaggttaccttccccacccactggtccccagaggaggacactcagtaggacagcttgcttctagcaaagcccaagatggcttttctctaaaaacattgaaaagatacatggtggatgcaaaagcatttggggtggacaatggcagcccagcgtgacaccctcctcattctggcaaggaaagggatggacagaggcctgacactcaactctaatattctcccccaccctacacagggctcctagtcagacactgtataagtggggggccacccaggcatcaccaactgtaggaagagaattggcaagcaggaagggaaggaccaaaatgcacaaatagaaaacatgaccccagagaaagtagtcaattaagggaatagaaaagaaaagaaaagagaatgtgattccgaatttactcaacaagattcaaaacatgtattagctataaaataaaaagaataactgaaattggtaaatcaaatacagataatgagaaggaatgaaaaatatggcaagtaaagttggaagaatcttccggaataaagatcaaaaagtaaaaaataaatagggagagaaaactgtgcagaatatcccatatctaatcaaagcccccaaaagaaaagagacaatggatgggagaaaatgatcaaataaatatcagaaaaggcttttctagagctgaaacacttgatcttcagattgaaggcaggacgatcacttcagcctgggagttggaagctgcagtgtgctatgattgtgccactgcactccaggctgggcagcagagcaagactctgtctctaaaaaaatttaaaaagtgtctaccaaggtcccatgtctggacacattctcatgaaagataaggagactatcttaaaagctttcagaaagacaaaaataaattcacctatgaagagtgggaatgaaaaagcagtatttctcatgagtaaccttagatgttagaaaagttaaaaagaggccgggcatggtgggttacgcctgtaatcccaacaccttgtgaagccaaggagtttaagacaagcctgggcaacataggaagactcaatctccacaaaatttaaaaaatctctacaaaaatttaaaaattagcagtgtgtggtggtgcatgcctgtggtcccagctactcaggaagctgaggctggaggatctcctgagcccggcagttcaaggctgctagaaaaaaacaaaataaaaatagaatgggatagagattttttattgttattgttcatttttctttaagtttttaattgcctattaaaatatatctgtgactttaagtccaaatatgaaacaaaccaaatgaagcatacttttaagcaattaataaagaggaagaagaaagaccatttgaccttagtgttgggaacagccggttgtggtacaggagtgaggtagctggacccagggagagtgacgtgcagccctactctccatagcacaacacttctttaaaccattgcgtgatccccctgtcttttcccttactgtctgcatctcacccctcactcccaggggactcctcctgtctgttcatcacagtaacttcagcagctggagcaccacctggcacttttcaatgcataaatgagtgcttatactgccttaatattacaaacattgtttattagatttcaattttagaaacacagttgggcaaagaatgggagacttaatagaggtggaaagatgtactaaggcccggcctggtggctcaagcctgtaatcctagcatttgagaggctgaggagggcagattgcctgagctcaggagttcgaggccagcctgggcaacacactgaaaacccacctctactaaaatacaaaaaatttgccaggcatggtggcatgcacctgtagtcccagctactcaggaggctgaggcaggagaattgctagaaccccagaggtggaggttgcagggagccgagatggtaccactgcactccagcctgggtgacagagtgacactccgtctccaaaacaaaaacaaacaaacaaataaaaaaacccaagatgtattaaagtgtgaatggccttcagatgtaaaagtagaaacatggctgatgaaggatggatcctggagggggaggctggagttgatggaaaaggcaaagaaaatgttagaagttctgagattctcatccagaaagtggagggcagagaactcctggagcaagcaatagcgctgaattatatttaaagttaaattaattcaagctgttggccgttatgaataatgctgctatggacgtttacttacatgtcttttcgtagacatgtgttttaattatcttgggtaaattcctgtaaatggaaatgtctagaaaaggcaaatgtatggagacagaaagcagagtggtgcttggctactgttgggatggaagtgatgttggctttaaatgggtaggagaacatttctaggatgtcagggatgttctgaaactagattgtggtgatggttgcacagctctataaattaccaacaccattgaattgcacacttacaattttatggcatagaaattatatctcaatattatattttaaaaatataataagtaaaacttctaaaagaaaattataggagaataaccttatgacttgggcataggcagacacttcacacatacacatgcacacacagacacacacacaaacacaagtgccaataaacacacaaaaaaacacttaacatcattaagtcatcagggaactgcaaattaaaactataatgagacacaactaccagaacagtaagatatcagcaaagatattgaggaactagaattctgaagcattattaatgggaacataaagtcatacattcactttggaaaaatgttctggtggtttcttataaagctaaatacacacaacatttctgcttctaggtgcatatctgcaagaaataaaaacatatgtctgccaataacatacttgtacaagtatgtttctagcagctttatttatgatgagcaaaaactcatggaaacaggccatgagtccatcagtaaacaaccagatagacaattgacataggcagtgtcatgaaccatctcaaaaaacattatgctgagtgaaaaagaaatgctgtttataaaacattatttattttacagattctttctgtatgagttatggaacaaggaaaactaatctaccatggaacaaatctgaacagtcattgtctctgtgctggggacagtgtagggacgtggagaaaaccctggggcagtggtaatgttcagtacctcgacagaggcttcggctacacaggaatatgtgtttgtcaaaactcatttgagagtacacttaagatccgtgtattgaattttatacacatttcatttcaaaaagataaagaaggaaaaggattgccctgagaatgagagtggtattgactataaatgggtatgggaaagttttttttgtttgtttgttttgttttttttgagacagagtctctctctgtcaccaggctggagtgcagtggcatgatctcagctcactgcagtctccacttcctgggttcaagcaattcccctgcctcaccgtggggtggtggaatgttctaagactggattgtggtgatgactgcgtggctgactgaactctggatcagtattgcaggctgaagtgttgacaggtggagtgcactgatgtctccaacttactttgaaactcatcaaaaattaatatggattgatgacagaggcacagacaaatgaaaagatgtgcgataaagcaagtagagtaagatgttgatgaaataatctatgtggtgtgagtatgggtgttctctgtgaaattctttgaactttgtgtatgtttgaaaagagtcataataaaatgtggggaacaatgtaatcaagggaagagctaaaaataatacaactattaaacataaagaagagaaacagaggaagaggtactggtgagctaagtccttatttcttatttttgagagtcaatagatattctctaaatttaataaatcttttaaattatttttatttttttcttttttcttagagtcatggtctcactgtcacccaggctggagtgcagtactgtcatcacagttcactgtagcctcaacctcccaggctcaagcaattctcctgcctcagcctctcgagtcattagaactacaggtgcacatcatcttgcctagctaatgtttcaaaagtcttttttctttgtagagaaaaggacttgctatattgcctagtctggccttgaacttctggcttcaagcgatcctccagccccagcctcccaaagtgctgggattacaagtgtaagcaactgtgcctggcctcaatttaataaatcaatacagatatacattcatattatttcacacaatggaggtaaagaacaaaggaaataagacagaaactatctaaagaaattatctctgagacataagatgggggaagtgcattaaatttggctttcataataaccttttgaattttttttaccattcaatgtattactttgataaaaaaaaaaaaaaaagaacacacagaaaatgtctctgagcccacagacacattcatcagctaaaggactgccgaggaccttagcccaaagctctctgcccactctctgggtctgagtgattgacgatgtcgggagtgtcactgctggaaggaattcaggatcagaaccactttcatcttgtgtcaggagtctgaactccatggctgtctggtgtctgccaggtgaagtgcacagctaaatgtgttcagattattccagaatgggtcattattggagtggggaaaacaagtgcccacacacagttgaagcacacgctgggtttttactgattcccaaagttattcccttccttccaaaatacaatagtttgatccctctatagtttataagtgtgatgattgggtttcatactcatgtgtgagatgtgcctccctcaaaccctctcatgccaccagcacataacccatcccatgtgaagtagaataagacaggttgcacaacatggcaatttgaaagttagtcatcatctcaatgcaagcagatgggagagaccaaggtgccttgcacttgaccctactaggagatttaatctcattgcaatggaagaagatggctctcatctgaattgtctgcttctatacttgatggtactctgtgtgctgagaacctgtttcttgccaagtgctctgtggctctaagggctggagattctttgatttcaaaatttcctaagtccagtgcttctggttgaggttggctgctttccatagcatctaggaactacattcccatggacaatcaccatttatccatccagccatccatccagccacttatctaacaaatactaacagaatacggcacatggcgctcattctaggagctcaaaaaattgctgtagacaaggatggacaagatccttgcccttgtgtgctgactttcagttatttagagcctctatagatacatgtttgaatgtcacgaagtaatttatcagggttgcctaggttaaaaactgattgaggtggagaagatatggtggcaagagaagaactcttcggggaggtggcattttatctgggacagaaggttgaggattcagctatgaggaaagtatgagagagtatattccaggtgacggggaccacaagaacaaagccctggaatcagaaggagcttgatgtgtttgagaaacaaaataaaggccactgtggctgaattttggtcacatgagatgaggtagaggaggagatttgggacaggtcttttaggaccaaacagatcttggtaagaaatttggattttattctcatttgaatgagaagtcatctcatttgaatgagagggttttaagcaggaaagtgacttaacagaatgtgtattttaaaaagatgattctggatgcactgtggagaatggaagacaggaggatatggatgaaaactgaggactgttttagactttcagggcgaggcaacagtggcctgaatgcctatggtggtgatagagatggagggatgtggaataatttgagatgccatgacactgtttttccaattatttttttgccaaatctgccattactgcacctttgggatggaagtcactcagtgtggtgtttccttcagtgaatcccgtctagtattccctgggtccactctggaaggagatattggtctgccatgcttttgggaaccagatagcttgcttggggctacagcatagctggaggacacttcctcattacctacaaattgtcctcagtacttagaaactgtcacatcaggccaaccacttggatctttcccagctctaatcagaccctgcccccctccatctcctggttctattttcactacttgaccacactcttggggagtccaccccagaggccttactgcctaagacaagataatttcccttttcccagttctagaaaaatgtgtgggattggtccatagtagactgacctatttaacatgcacgctccagaaccagccacaagggtcaggggaatggcacagctgttgtcttgagtcagctgtcaactgctcaagctggtgtgtacaggaaggagctgggcaccagacccacgttgtctgagaccaacaggaggatgattcttcaaggcaaattgagatgctggcagcagcagaagggagaatagatggccggaaggcaatcacaatgagatctctgaagtatctttcaagctgtggctcccaagctctctcttccaggaaccattctatatctagtctgccttggagaaccagcttcatcatacagtggactttctcgtcaaggggaaatgcagacaaatcttgtcagtgaccaggtccgatctttcagggaagtcttgcaagagcctaacccatggtctacaggtttctgtgcatgcactgtgaacaagctcccactggtaaagaccgcacccagtgttgctgtttcaaaaagttccaggaagaatctcagccctggaaaacaaaaatgagtttgacccagagatgcctgagttggagatgaactttgaagaactacccttgttagcatactgaaatctccacccagggaggagctcatgcaccgttttctgtacatgtgaggtatgtggaacatgatcagtgatgggctttaatccatctccacattcaatgactcagctcaataaaagccaggctttcacctttgttctgggaggcactgcttgggaactatccctgatgtcctccttacttgctgcaaggcatcaaatccccctgttatacctgccttggctgtcgtcattggacgtcacctgccaagccattgaacccacctgtcatgtgggtaacaaaatgagaaacaaacaataggtctgattgtctgactgatcatctgaagacatggtatgaagatatttattcaacacataattttaggtgtataccctggacctggagctgtgcaaagtgtgtgagacccaaaggtccttcacactcacgtgacctcagaaagagcccatgcctgcctcatggacagagcacagcacaggcacagacgggcgctcagtggaagttgtgagtaaataaatgacagcttagcacacgcgtcggtctgaaagaggcagtgaagttaagtgatggatagaaatcgctgttctcagagccctcagaaacgctcttctcacagccatgcctccaatcagtcactgtaggctccttctgcctacagaaatgaagcctggtttcttcacctgggaacacaccccagatggaggtcccttggcatcactggtatgaggccccctgcccagtgtagctccctggtttgtccaaatcctgctcactttttaagactcagctgcaggaagcctcgttccctgcaccaagttccactgtgtcgcctcctgcctgtgcacttccactacgtgcgctcctgcctgggcctcctgccttgtgttcctgctgacaccccctgtcactctccctgccacctgcattacggaggacccagtgctcacctgcctctcactcaggatctcaagcacttgagagcagaggctggcctcctgcagccctggccaagaccctcccaccgaagacacagacgatgctctcaccaggtccccactgggcttgattgctttattttactcttagaaacagtgtttcctttaaaatgcccaaattgggccaggcgtggtggctcacgcctgtaatcccagcactttggcaggccaaggcgggcggatcacgaggtcaggagatcgagaccatcctggctaacatggtgaaaccccgtctctactaaaaacacaaaaaattagccgggtgtggtggcgggcgcctgtagtcccagctactcggaaggctgaggcaggagaaaggcgtgaacctgggaggcggagcttgcagtgagccgagttggcgccactgcactccacctaggcgagagtgtaagactccgtctcaataaaaaagcccaaattgtgtcagttgatgcagtctttcaaatgctattatgctgaatatttggtagcagcaaatactcaggctctaatctgaaaagacatcattatcatgaatgcctgttcttaatcagtatggactggggcaaatggctctgcagagttttctggattttagggttaagctcctggtctgctggggagaggatggggccaaggagagggtgaaaaagagtccagctatgcttcaatgagtcacttcaatgttatttggttcattgaggttttattggggaaatacttatcatcaacagccagagagacttttggaaaaaacatgcaagtgattgatgaattttcaaaaagaaaaaaaaaagagtatgatgaagaaaatgacaccaggatgtgcatccttgctggcaggaggtctagggtttcaactcacacaccagatcttactgattgaaaatggcaaatatgccaggcgcggtgtctcacgcctgtaatctcagcactttgggaggctgaggcaggtggatcacttgaggtcaggagtttgagaccagcctggccaacatggtgaaaccctgtctctactaataataaaaaaattagccaagcatggtggcccctgcctgtaatcccagctacttgggaggctgaggcaggaaaatcacctgaacctgggaggcagaggttccagtgagcagagatcgcaccactgcactccagcctgggctacagagctggattctgtctcaaagaaacaaaacaaaacaacaacaacaaaaaaaacaaaagaaagcagcaaacaaatattccatgactgactagtgatgtctgccatggttgtggaatagacaaatgaagacaaaaagaaattcaactacatcattaaacaacaaagagtattaatccatcaaaaaagcctatgagaaaaaaaaagccttcacttataaattcttctctaaaacaaagtatgttttatgttggagagcggcacatggtttctattgaggttgctcagatgaagagagaattctgaagctgctggtagccatcttgtcaccaagaggcaagaagctagctgaaagtgaagacaaatcaaggaaatcagagccaagagacagagagagactaatttctaatgatgtcctttccaaacctggacctagctatcctcttggtcaaaaagatctacccttggtctttagttacataagcttattttttctctgtttacttaaactaatatgaattgggtttacgttatttgctacccaaagaatcctaatagatttattaaaagagccgagagggaaatatcttgtaggaagatcacttaatttcttttgaatttgagtggtcttatctgtcagtggaaaataatgaacttacctgtatttgtttaataggattgcagtagaaaccagccaggataaaagatgtcagagttcttggaaaaatgtacatgaaatttcaaaaattaaattccagcaggatatgtgagtgtgtgtatgtatgagtgtgatttgtgtgtattctaaggaagaggactaggtgatgtgtatttcagatgaggtagataatccactaccttctgtttttgatttaggttttggaaaccctgatccataaaaacatgctgctatgtatgttattcctgccacatccaccaaagccaggaaattcttttctttgtggaatccacttttccaatggaatttcctatatgattgaacactttgattatatatgtattttttttttgatggagtcttgcgctgttgcccaggctggagtgcagtggtgtgatctcagctcactgcaacctctacctcccgggttcaagcgattctccccactaagtctccagagtagcagggattacaggcacccactaccatgcctggataattttgggatttttaatagagacagggtttcaccgtgttggccaggcttgtctcaaactcttgacctcaggtgatccaccagccttgggctcccaaagtgctgggatttcaggcttgagcccctgcacctagccagattacatatgtatttttgattatgattttcttacagcatcctgaaactttgaacttagtgatttattcatgttgcctgcaatgccccctgtttagcactgcaatgctctggcagtgttatgggctatcccccaaaaattcataacagcatgtgactgcattgggagacagggtctttaaagaggtaagctgaaatgaggttactagggtggaccctaatccattataactggtgtctttataggaagagaaaatttggacacacagggagaaaaccacagggaggagatggccatctacaattccagaaaagcagcctcagaagaaaccaatctgcaaacatctttatctgcaactccctgcctcccaaatggtgagaaaattaatttctgctttttaagccaaccagactgcaggactttgttatggcagccccagaaaattaatacagacagcaaacggccagatgtcccacttgaaaaatggatccaggaacagaaaagtaaatgttgtgagaatgacgtttgatggcagggttttattctgcagttgcctacaggaatgacaacagaaaacttaagatggtatgttccaaaataagctctgtagaaaaccagtgtgactgctactttaaagaaaaattgaggagtgttttacttccagttatgtggtaaattttagaataagtgcgatgtggtgctgagaagaatgtatattctgttgatttagggtggaaagttctgtagatgtctattaggtccacttggtccagaactgagttcaagtcctgaatatccttgttaattttgtgtctcattgatctgtctaatattgacagtgaggtgttaaaatctcctactattattatgtgggagtctaagtctctttgtagatctctaagaacttgctttatgaatctgggtgttcctatattgggtgcatatatatttagcatagttagctcttcttgttgcattgatccctttaccattatgcaatggtcttccttgtctcttttgatccttgttggtttaaagtctcttttatcggagactaggaatgcaactcctgcttttttttgctttccatttgcttggtaaatattcctccatccctttattttgagcctatgtgtgtctttgcacatgagatgggtctcctgaatacagcacacagatgggtcttgactctttatccaatttgcccgtctgtgtcttttaattggggcatttagcctatttacatttaaggttaatattattatgtgtgaatttgatcctgtcattatgatgctagctggttattttgcccgttagttgatgcagtttcttcatagtgtcaatgttctttacaatttggtatgtttttgcagtggctggtgccagttgttcctttccatgtttagtgcttccttcaggagctcttataagacaggcctggtggtgaccaaatctctcagtatttgcttgtctgtgaaggattttatttctcctttgcttatgaagcttagtttggctggatatgaaattctgggttgaaaattcttttctttaagaatgttgaatattggcccccactctcttctggcttgttgggtttctgccaaaatatccactgttaatccgataagcttccctttgtaggtaactcgacctttctctctggctgcccttagcattttttccttcatttcaaccttggtgaatctgacgattatgtgtcttggggctgctcttctcaaagagtatctttgtgatgttctctgtatttcctgaatttgaatgttggcttgtcttgctaggttggggaagttctcctggataatatcctgaatagtgttttccaacttggttccattctccccgtcactttcaggtacaccaatcaaatgtacatttggtcttttcacatagtcccacattccttggaggccttgttcgtttcttttcattcttttttctctaatcttgtcttatcactttatttcattgagttgatcttcaatctctgatgtcctttcttccgcttggtcgatttggctattgatacttgtgtatgcttcatgaagttcttgtgctgtgtttttcagctccttcaggtcatttatgttcttctctaagctggttattctagttagcaattagtctagccttttttcaaggttcttagcttccttgcattgggttagaacgtgctcctttagcttggatgagtttgttattacctgtcttctgaagccgacttctgtcaattcatcaaactcattctccatccagttttgttcccttgccagcgaggagttgtgatcctttggaggagaagaggcctactggtttttggaatttttagcctttttgtgctggtttctccccatcttcgtggatttatctacctttggtctctgatgttggtgacctttggatgaggcctatgagtggacgtcctttttgttgatgtcgatgctattcctttgtgtttgttagtttccttctaacaggcccctctgctgcaggtctgctggagtttgctggaggtctgctgcagaccttgtttgcctgggtatcaccagcagaggctgaagaacagcaaagtttgggaaagtttacacactctaatgccctgctacccagcctttaaaaactgatttaaagattttaggaatcctagagaaaaacaaaccagtagtatcttattacaaagagagaaaagtgaatagtccatggcctcaataaacagtctttagcctgcagctgaactggcattccatggagcacactttctgacatgcatactcagtggttccttcaatgtgcagaaagtcagctggaaggggagttgagtttcaatgagaagtgaagcatgtcatgcatgggcagccagcaggaccccataagtctgcatgaaaatgctgcccagagcacaatttgcaattgcaaatatatggaaccagcccaaatgtccatcaatcaacaagtggataaaggaaatgtggtatgtgtgtgtgtgtgtgtatatatatatgtatatatatacatacatatatatatacacacacacacatatgttacataatacacacacacacacacaccatggagtactactcagcaataaaaaggaatgaaataatagcattggcagcaatctagatggaattggagactattattctaagtgaagtaactcaggaatggaaaagcaaacattgtatgttctcacttccaagtgggagctaagctatgaggacacaaaggcataagaatgatacatcggactttggggactcaggagaaagggtgggagggggtgagggataaaagactacacactgggtacagtgtacactgcttgggtgatgggtgaacctaaatctcacaaatcaccactaaataacttattcatgtaaccacacaccacttgctctctaagaacctattgaaataaaaaataaattaaaaaaaaagaaaaagattgcttttcagaatggagagggcacatttcaataattagcacagatgttaacagcagctcatacctgccacacagacaggaaattgcaacttctgtgtactggagctttgttcataactgttgtcagggttaacaaagtacctgcttaattattggtagctgggaatacctggggttgtgctcacgtgttcataggctttgtattcctcagagctcagagacgaccatgctcatgtgagaaacggcatggcgtgttggtagaggggagcaaagagggaggctgggggagcaggttgagaccagatgctgcaaagacaggaatcaccctcaagaggccggacttgctctggcagggagttgggagatgatgaaagacactgaggtgtaagggtggcctttggtttttaatcaaaaagaagcccatgccagcatctaactaagatcatagcaccaagggaaggaatgggaagcaggggagctagagagcaggtatagtaggagaaagttctgacccaaaggctttggccaggtttggggaatgcagagaaattcagggatgaacaggttctttgtggtttggtgggacagagaggaggatgcattgcctgtcacttgatcagggagtcaaaggagagcagagtttggaccaagagagttctacattaaacgccaagtgcttatgaatcagagtgagagtctcccttgctgaatctgcctcttttatcttggctgttccacaacatagattccattgtacaaatgatcatatagacattgtgtgatgttctaagccaaaaagtgactctggcagttccagcctgtgagtatcttttggcaacgttctagtgtgagaaggagttcctgtgcagcactgtctgtctgactcagctctgcaggaacggctggaaccacagagctcatgagggtacactgctcacaggcagggctcacacacactctgaacccagctcccacgcctgagcaggtcacaccaactttgaggcacttccccggccctaacatgttttaaaatttgaatcatgcttcaagtgactcttttgagattggcagtgatggaaacagtctaaggaagggaacttagttttaaaatagttttaattgtagagatgacaattgacacagatgtgtcaggaaaacatgttggaatgtctcgactggcagtggtaattctgtgagctcagttcacattccaagtgctctggcttctgacttctggcatttaggaacctgagaaacatatgaatctatgcacacgaaaaatccaggcactaagaactcagccttgattagccataagtgtgctctctgtagaaggggaaaataacattgtaaggaatatgtttaacctatgtaagaaaatacatgattttaacatgaaatataaaaattggtggcattaattgtagtcttttttatcagtccattgaagttggctcagcaggctctgtttctcccactcttctctggcatcacatttaattgttatgtgtagtgtaaggtctgcagaatgaaacagtcctccttttcaaatagtgtctaatgtgaacctcagtgatccagactggcctctgagaagattgaagagttttcgaggacaacgatgtcttgaacgagccacaaggaacactccaactttgtttttagatgaatttccacgtttttcttctgcaagggtttcggagaggtagcatgacagacttctttgtacagaatgttttcagaagttgtgttaatggagaagtttcttttggggcttaagtttctatttaccttttgtgacatggtttttaaaaaacagcaaaacaacctcattatcttcctctcccacaatcgttgccgtagaaaggagataaggcagatcccacgtggactggtggctgggtgcgctgccaggatagctaaggcgccccttttacaaacagtctttgacatgcagtcacacccgcaatctcggtgctgggtgataagaaggattgtattcattacaccgttgaatacagaaacatatttctgaaataatttttcttgtctagaattccgcagaattccgctgagtggcacattcaaaagaatttttattaggagggttccaatgaactgctcagcggcagagggactttatatttaatttgatttctcagaaccaggtattgtggagaaaggcatcagataaccacggagtgctggttaagggagggaagcctcactaagcagggttcatgcgttcaagccccgcagccaacaagcattctctgagactctcattctggagtgggcaccaaggtgcctcgaaatcccagtgggttcatgaggcttcccgcctcttgtctccttgcatttggttacagagatggcacagtatttgttattgaggctggatgaaaatcaactgtggccagaccttcacaacccacgtatgggcacaggacttgggtgtagagagaaaccaagtgaaaagtttgtagtaaaaattttgccactgtggagaattccccttttctcattttgctttggcataaacaaagatcttaaaaaacagtttaacagcacgttgggaggctgaggcgggcagatctcttgaagtcgggagttcgagaccagcctggtcaacatgatgaaaccctgtctctaccaaaaatacaaaagttagcttggggtggtggcatgtacctgtaatcccagctactcaggaggctgaagcaggagaatcgcttgaacccaggagatgggggctgcagtgagctgagatcgtgccactgcactccagcctggatgacagagcaagactccatctcaaaaacaacaacaacaacaaaaaagtttaaaatactagaaagtcccatgagactatcgtgagcacctttgcagaaaaacaatctagtggtagactctgaggctggtcagtagtgggttaatggtggcccctaaaacaatatggccacgtcctaatctctagagcctgtgggtgtgatcttatttgcaaaaagtcttcacagatgtaactgagttaagggtctcaagagaagtagatcattttggtttaatttatgggccataaatcccaggataacagacgcagaagaaatgagggccattgaaagtggaggcagagactggagagaagctgccccaagccaaggggcacctggagccaccagaatctgaaagaggaagaaagagttcttttctagagccttgggagggagcatggccctgccaacatccagcttctggtgcccagagctttgacagatcacacttctgtcactgaagccacgaactgtgtaagaattatccaacagcagtctccaagggtgcaatggttgagtctgcaaatcacatttgagagtcagaggatgtcagagctggaaggggtctcagtctctgcttaaagagaagatgttggacaagctactcccttggacctgaattctaggcctgccctgacactcacaggctaagtgctttttcgagaagctggtggatccttttttccaagttgctctggcttagtctagaaagctctcaggatctgaccccaattgcctccctctgtaacctcaccttccacccccaccttctggccctccggccacaggaactcttctgaacatgttctgatcctgctgttcatatacttgtctctatatcaggctgagagagggacaaggcatcctttaaacccagattcctgtccgggggccttgccctgatcctccagctggggtcgctcttccccctgctccctctgtgcattgtacgcactgtggattctgaccacactttagggctactcacgaggcccagcagacctgcagggtctgcctccaaccttcctcctagagtgacctctcatcactcccactgcagcccctcagatgcacctggacccctcctgccacggggccttcgcacacgctgtgctttccctaaagtcctctactcctgtttgcaatggccttggattatagttaaaatgttccatatctttgttgggttatttgttcaatgtctgtgtcttcactcggcagcaagccctgtggggcatagattatgctggattttctcctggtgtagagcccagtacatagcagatctaacaagcaaagactgtgggtgactatatgttagatctataaagatgatactccacaactttaggagctcctcaagggtagggacttgttaattttatatctctggtatttaatagagaacctttgtagaaaccataaactttgatgcaccaaagtctctagaggccaggcacagtggctcacacttgtcatcccagcactttgggaggccgaggtgggaggatggcttgaggccaggagttggagaccagcctgggcaacataatgagactccatctctacaattttttttttgaattattcgggcatggtagcatgtgcttgtagccccagctactcaggagactgaggtaggaggactgcttgaacccaggagttcaagggtgcagtgagccatgattgtgcctctgctctacagcctggggaatagagcaaggctctgcctctttaaaaacagaaacaaaaacaaaacaaaaaaacaaaaaaacaaaaaaaaaaaaaaagaagtcaccatctgtgaagagcttcttcttgccctttagatatgacaccaacttctactgcatctataaaccctcatgttccctctgctcctttagtttccaacctcatctcttgcactttcctttctgccagtcctgcttggcaaggccttcagcttttcacacactggcctctgccctgcttggggccttgagcaggctcttccctccccttggaactcttttccattcctttccctgcctctttgtgtcctggttgattcccagctgtcttttcagtctttgaatatcacttcctcagagaaagctttgctgaccttccagtctagcttctggtggctagtgaccaccatctagttttcctgcatggtttacagaactcctagcatgctttggcatgcatgtcttctgttgaatgcatgccttccataagctcacaaagctaggcagagctggatggtggctgtctgatttcaaagatctctactcttggcacttcattacccaaccctccctgaaggaagggaagtgaaagaaacagaaaagcagaaagaatgcatgaagactctgtggaagagggccactgtaatgacttccaaagcccctgtgggctttctccctacctggcaggagaagcacactgtgccccggagagctcagggaggaggcaggacgctaggcatgactttggtgtgaccctgggttgtctcccagcctcctccctggcccatccacagcccctgcttgccatagagccaagtagcttccttatgcagtaggaactgttatccccatttaccagagaagcaagccaaggtgagcaatggacagacctggagctgccagcatgatcgtgtggttgcaaaccccgagctccttccaataaccgtgtgtcttataaataacggcgatggtgtgagctgtgtccagcacccctgaaaaaaatgccctagagacagtgctgtcaaatggatagacaagtagacagacagacaggaaatcatccctttgctaccacccaagacgttgcttcctctcagtctatttcccaaatcctcctctcccgcaccccataatcttgtcagagcttacctcctccctacgctctgcactttcattaatttcttatcacctatccctcagctgtaatctaggactttgtaaggacaattaattaaagtgagaaggttcttaaaaaaaggtattgacctgcaattcagccctttctttcagcaaaatcaatcttcagattacaggtcaagaggagacatctttaaaaacgtgtccagccaatcggttcttcagatgcgttcatgaagtcacacctgctgtgtatgaacctgattgcatgtcctgctttctgcctaagaaaagcacgcctaagtacacatgggcgtgcagcttgtttgaagaatctgttgctatagaaagataaaagggaagaaaaagataaaatatgtataaaaggaaaaagcctctattgatttatctatctatccattatatatatatgcacttctggtccttaatcctgggcagggtgtctgctgtcagagatgggcaaggatgggtgtcagccattggagagctgttccagggagggagcccgaccactctctggccttagccagcccagtcagcactggagaaagacctcatccaacgctgaaatagatggtgctagtgtatgcattacaatagcaggtgagtaaaactgtctgttgtacaacatgctgatgtaggagctttgtgattatctagcctaatgtgtagataaggaaatcagggccctggcaggtcgctaggcatgactttggtgtgaccctgggttgtctcccagcctcctccctggcccagggctcggtcttgctgtatgtggtccattcccaaaactgaaattcaggacctctgtcacccaggctgggctctgtccaagacaagctgccatttctcagaggagaaattgagagaagcagccaggcatcttcctgtctgaccccaacactggggttctaatctcccctaagctcacacagcaactccccaaccacttttgcagagagaacaaaaagacagatgttgatttacccggagagcatctgtcactaatagtaacacgcggctttcactgagggttaactgtatccaggtgtggttcttatcttcttacaagtattagtgcatttacaaataaagtgtgggaggcttagaaagttcaagtggcttgtctcagctcacagagcaagtcaaagttggaaccagaattctgggattagtcctgtgttgccaacaattctttattgcctcaacagacaaggttaacattaatttgaattacttgagctaagctgaatgacttgattcctgttccttacattgatgtggatgccaagcctgtgcctgaccattgccaggagcttaagggcagagataatggaacaaagagaagtgtatggcagcagagtacagtgaacaaaatttcccgcttaggttaaacggtggcacagttgtgttctgccgcatctcgagaaaagttacttaggctccgtgatcatcagttttcttatctctaaaatgggcatagtaggattaacctcttagggttcccagggatcttgggttagtctgcacacatttccaggaacatgccaggcacctggggagcagcacagctccttcacaaggtcctccatcatcatgaatggatgttagtaatcatgactgacacagatgctgcctaagggatgatgatggtggtgatggtggtgatgaaggtgtggttacgctgctgctgtgacgatgggatgacagcaaggatgcagaagaaagaacacggctctgccatgtcaggaccatttaggtcagtggttccgaactaggagtgatttcacccacaggggatgtttggcaatgcctggagacacttttagttgttcacactgttgagggaggtgctattggaatacagtgggtgggggccagggaccttgttaaccaccctgcaatgcataggaaagcccctgcaagaaagaatgatccagccaaaatgtccgtggggcccaggtcaaaaggccctggtctacgaggacgggaaatctgaacactggaggtgagtgacaaagcttccaggagccttgttgactacttaacatgcctctttcagctactgctttgaactgtacaggaatctgcgcctaaaaggaagagggcagaatgcccgacagttgggaagactatagtgaagccattccgcgggacctcctccctctacttgcagggcggcctggtgcagctgcgtctccagcccctccaagtccacgtggaaactgtcccctggttttctggatgtgcaagaaggcgtctgctggagcagtcttgctctcccaagcctctcacgctgtcatgggtgcacagaagcagtgggggagggggagggcatgggaggaggagagccacccataaatgaaagaacagtggagcatcgatcagcgctttttcgcagcgcgggagctgcttcgctgagccccagcaccgtcagacagacccctgattaaacatatgcagctgcacggatggatggccctgctcagctcccatcagcaactctgccagaaaggaagaggcaccacggaagttgtgaaggggcccagggctggcggctgggtatctggagggctggcaccctcttccttccaccagagctggctccaaattccagactcaaagcagaaagtttattctatgtttttccaggagatggggcaggttggagatgagagcaaggggaaggcgcgattccctgggaatgccctgttgttttcctctctgggaggccttggggtgcaggttccagatactgccctggttcttgttatagggacatggtgagtcctcaccaaattccaaatgcctccacagagagggaggctccgtgtggtaatgaagcctgctctgttcatttcgtcatttggaattctcttggatggcctgtgagttttctattatagaatcaaaaccacattttcttaaaacatgagaggctgtggtctattctgcctgagatccccatgtgatgccagaggagccacaactcacaggccctgcatcacctgctgctgtgtgcggatgaggaagtctgtcttcctggagggggttcttatgagcacaaacagtgatgaacgacgttaaatgcatgatggaaaactaagccaccacagaaagctggctgctcaccccacagaggcacagaaagctggctgctaaccccacagaggcacagaaagctggctgctcaccccacagaggcacagaaagctggctgctcaccccacagagggagagcactttgtggacaagacctgattcttccttccttccttccttccttccttccttccttccttccttccttccttccttgcttccttccttcctttctttttctttctctctctcctttctttttctttctttctctttctttcttcctttctttctccctttctttctctttcttcctttcttccttccttctttttctttctttctctctttctttccttctttctttctttcagcaaaatctcactgtcactcaggctagagtgcagtggtgggatcacagctcactgcaacctcgacctcctaggctcaagcagttctcctgcctcagccttctgagcagctgggagtacaggtgcacaacacctcacaaagtttattttttaaagtgtttggtagagacagggtcttgctgtgctgtccaatctggtcttgatctcctggcttcaagcaatgatcccaccttggtctccaaaagtgttgggattacaggtgtgaccgccatgcctggccaagacctgcttcttaatcattgctggagtcgtagagcctcacactgtgccatccatggtaccatagagagaaaggaaagcacttataaatgtgtacattaccaccccagctgcctcccagggaggtgaatccctcatcaggcgccctctgctgagtgagtgatggctatggagatggcggggaggtgaatccctcatcagggccccctgctgagggggtgatgagtatggagatgcaggagaggaggagttggtacagagctgaattttccaacacacaacagaaaaataaatgaaaagtaaggcagtggctaatacagggttggggtggggccaggggaaattgagtggctggcagacgggtagcaggaaaggggaatgacgggggctgcaatgttacagggcaggttctgaagttgtctgacaggcggtgagtgatagagacctttttctgggtctcccagtgaaaactttggtaaacacgtgactgccacttttttaaaaggagcttgcatttgggggctgcaaggttgccgcaaggttagacccgagggtgcccatgggagacctgccacagccaggctgcatgggaagagggcacttgcttcttcccacagctgcgctggtacaccgcagcccctgactcaggtccagagtctgacactgccaggttcaaggttggactttacccctggcccagatctcccacgggctatttattcctatctcctttgaaattcagcaacgtattataccaccttgaagaagatggggcagagcagaggggaggctagagggacaatcccaagcagagtcctaaatctacatcagattttccttttaaccaaaacctacttggtattcagcagaaattttgagtctagtgtttgacataatttaatagtatgcgttaatgactataattttcccctgtagtcgagatactaagaaaatgagaagtgctttatctacaccacacacaacagtaaccaggacagacttggaaatgacagtgaagaacaaagtctgtgagggccaatggcttgtggggaacttcagagacacgcagcactccacgcagaaagcacattccactccagatataagagggtgggaggctcactgatatttgttatgttcttttacactgaccacattgccgggtggtgggtaatactgttcccattgtgctgataccaaagctgaggccagaggggttaagagatggtctatgtccaggaataaaattcagatgtcgtaagttcaatttattttattttattttttatagacagagtcttgctctgttgcctaggcaagagtgcagtggtgcaatcacagctcactgcagcctcaaactcctggcctcaagcaattctcttgctaagcctcctgagtagctaggactacaggcatgcgccaccacacctagttatttttttcatttgttgcagaaacagggtcttgctatgttgaccaggctgatctcaaacttctgacctcaagcagtccttccacctcagcctcctgaaacactgggattacaggccagagccaccatgccaggctatgaagttttattttaagtttcgagatgtggggatttcttttttaaagcagcaagtactacctgaactaaaacgggtgattttgcaacttgctacggattatggaaatagttggcatctatattggtgaggtacccaccaaaactcaaacagaaggaatgccattttggagaacgaatctcaactttaaccttctttcatccgtgggtaagccctgcttttaaaaaatatataaataataataatttatttagggtaagaatacatattacctatcagaaaacatttccttctgtatgttagcttacccaggcaaatgaaaaccttagtaaaaacatttacacctacgtctgtcttctaaactacacctgtgtgtgtgtgtttgtgtgtgtgtgtttgtggggcggggtccaactttctaatgtacaagactctgaggcctggattgtttattgtcgtaaattgagttacttcttcttttggaaaaaatgtaaatgttgtgattacagtcttctttaactttcatgtgtttgacttgcattaattatatattggtagaattaaatgtttcacagtctgaatttggacttttgcgcatcagttgacaagtgttagtagctttctcaggtgcagcaatgcccgcctcctaaaggtccagctcagtaagccagtgtttgtgccactatttatgtgtctgttattttatgcttcaaaaaataaattacaacagaaaaatgaagctgctgatactagtaacaaagatgttggtcccatcactgtaatataattaaggccgagatggaattgatcaatgagcggcatgcataagtctccatctcaatagactttcagatggttgcattataaaggaaaagaactagattcaatgaaatgtgttaaatattgtgcctgaaaggcacaatgtgttcagatattttaagctagttttcagtctctggcaacagagcacatccacccagctgccaccacagctaaaagtataatactatttgttttgaaatgtcttttatgcatgctttcaagaacacattatatacaaaataagtgtttctaatgtgcttcactcttcctgtggcctcccagaggccaaaagccacattcgtagcccagttttcatgactgtagaggccctgaggccctgaatgtcatctcttccccactgctcactcctttaactggtgttatacctcaactctactgaacatttcctttgggccaaatgttttagaactccactgtcttggttcagtataaatttgtgatcttgtcaaatcctcttgtgtagtgaggtggggaacaggtgaaggcgtgggaagatgctgagcatgtatcaggtgctgtgtgagtgaccgtgaatgctgggaggatgctcctgcccattctgccataatggcggaggtggacaagcagacatgggtgtgcagtgagaccacatctacagcacaggtgtgcacaaggtgcctggagacctgcgagaaggatgtgtaaaccagcagctagccaagtgttcctagatagcaaaactcaaagtatcccttcagcatggaatatcatctatctaagaagtaaaaattttcagttgagtttagtgtctggttcagctgacagagcaagcacatatttatttcctgcagtggactgaatgtgccattccaaaattcatatgttgaaatcccaaacccccacatgatggcagtaggaggaggggcctttggaagttaatgagatcatgaggatggatccttcatgaatggattagtgccattatcaaagggaccccagaacactctcttgccttctttctattatgtgaggatccaatggtagctcagcagtctgcgccctggaagaggccctcaccagaacctgagtgtgctggctccctgctctcaggtttctcgcctccagagctgagagaaatgcatatttgttgtgtaagccacagtaatttattatttatgattaccattatttatttatttattttgagttcccaaatgagctaagacattttctctttctctaaacaacaggagtaaagagacagaaagggaatgaatttccaagaagaccagcgtagaacggaaaaatatcagaggagggagaattgttaaggatttccagtatctcaagtgtggatgctgtcctgagctgacccaaggctctggaaaggtaggagctctcttttgggggaagaagggaagaatcccattcctgaatgagcaggtgcagacacttgcaagataagaggcacacacagagatgtttacctgaagaactgcctggtggatggctaagaaagtggccctgcctaacacacacgtacggagagacggagtttgcagcaagacagtgaattatctgcttctcagtggtggcagggccctgtgagtagaatccttacatgtcctcttccatgggcttgtgggataagagcagagcagcctgtaggcctgtccatccccagccttgaggtaaatcccaccagtgaacaagatccacccatccacccagagctccctattagccttgtgagagaatggccagaaataaaacagaaactcctttattcacaaatccctaatttataaatactttgaaacaatgaagaattgccagctgctgtggtaaacagagcacagaagagaggtgagtaaaggttctagttagcactcgctgagcactttgtgctggcacttttctaaagattttgcaaatgttaactgatgtaattctcacatccattctctggggtggttttctttttctttttttttttttttgagatggagtctcgctctgtcgcccaggctggagtgcagtggcgtgatctcggctcactgcaagctccgcctcccgggttcacgccattctcctgcctcagcctcctgagtagctgggactacaggcgcccgccaccacacccggctaattttttgtattttttagtacagacggggtttcaccgtgttggccaggatggtctcgatctcctgacctcgtgatccgcccacctagccctcccgaagtgctgggattacagaggtgagccaccacgcctggcctctggggtggttttcacaaaggaggaaaccaaagcacaaagcctaggtggctcgctctaggtcaacaacaagccaatgccagagctgggatgagaacccaggttctgtgtctgtcatgaacatacactgcgtggctctgaagagaacagagaaagtcaaaaggagataatttcttatagactttaaataatttttccagagaaattcaagaaaacatcacatccatagaaacaaaacaaagccaagttgctatataaaagaaacaatatgtaaatgagaacaaatcattggaaatgaaaaatacgacggccaaaataaaaatgcaattaaaaagttgtagaagtcatcaaatctttcaaagtatagagcaaaacacaaaggaatacaaaagaaaaataaaatttgaggagcactggcaataaatttattgagagggcagtcgccatctaataaatgttctagaaaaagagaagtggaaaaaaattagggaggctactgcagaaaaagaatactgtttcttagaactgaggttctgagagtatctgaggttttagatttaaaatgtccactgatttcttggtagcatgaatacaaaatgacctagacataaacttattcccaggaaatttcaaagcaccaagtgtcaagagaagcttattcacttccagaagtgaaccagaaacttcagactggtacagaaatatttcactgccactagtaggcatgagaaggcagagacatgatgttgtgaagaaaaattattttgagcttgggtatttccaggcttccctgttcttgccatcctgctttgtgccccgggagaccagcagctatgtgttaccttgccctctggctttcagttgggttgtaaggatgagagacaaaagtagaagactgagaggagaaagagaatgaagtcaaagtatgtatcccctccttatgttcctgccagagagttgcagattggctgcctctctctactcaagaccacaggtcaaaccaggaagccctccctgttcatcttctctctctttgggcttgcagtggatctgccatgatccctttgattttcctaaatgttacccacatcttgtaatacccatatctttccttatccaaatttgccctattacatagttaggggaactatctgagacagataaactctgataaagagtgtggaatttcaaatctagaaattcatactctctaaactattaatagagtaagaaatagagatacatgtatattacctatggtcatgaaaataactaaaacgataactaaatataaaattataatgtcaagaaaatgtataaggaagacatgagagggaactagagtagtgtaaagagataagttatttgtctcccaaattcaagtgaggaaagaaaagaagttttataggaggaatgcaagccctttcaaatgatcaggcctagagagacgtgaaaatgagacagcaatcacatcctactcctgcctttaagctatgtattcacctattgaaacagcttgctattgtcacagatagctatgaattaaactaataatgcttcaccagacactgtattccacaccccacagtgtaaagaatgtatagctgatcagagatcagttttatttctgtaaaccaataagaattcctcacagaaccttgcaccaacactctctctgtctcccgttctctctctcctttttttcctttaaaagcctgcctgtaacaaaggccaaataaagctcatatccaaggttacttggacctgaacctcctgggcagctgtccttatcttagaatgtgagctaaagactcacaaggctcacaactttggaaaggagatctttatttctcatgaaggcctgcaacctgcaggctggccatcccacgggctgggaagtgtagcctccagccaaagcccaaagcaagcatgttgagggaggtgtggagggaacaggaatttaggctcaacaggctggctaaacataagtatttaacaagctataggagacatcatgaatatctgtgaaaggagaaacaagcacatgtgcaactgagcttcatgcttcttcatgggtcacatgttttaaaaaatggtgatgttggcatgatctaagagtggatatctgggccctcagatatccaaaaggtgacacagagaaggacacaaaaactctcactaagcatcctccacaaattggccaaaactagtccagagatggtcagtttttaggtggggaagcatcgtgaaactgctgagctgttgggtcaaatgtgtctatgtcaaatgaatccagttgtagcctcagatgactggctaaaggtgattaaaaaatgagttgtctgtttcttgctttctagagctggtttctgtttactccttaggaaggaattctggttaaaggataatgaggaagggacttactgaggcgtgtctgacctcccatcccatcatggccaggaacccagtttttaaggtttatctgggattctcctggccaacaggggaatccgtttagtccactgagggacttaggatttttatttctcagtctcaagtaaactgtttaaatctcattttgcatttcattctcttctttttaggtgggcaaaagagaaaaagtaggagaattcctagaatttatatttagagtaagtgagcagcagtgtcaatgctaaaaaattatatggttatcctaaaaaatttctttctgcaaagctgtggctgagttggtaataaattattaaccactggaaatgacaagatgtgtaaaaccaccctctattttttaaatatttggctattccactcctcccataagcttcctttgtcccaagattaattattctaaaatggttgggccatttctccagaatacagaatatgttagctgtcattattgcagacttgtgaaatagtagcgtttgaatctcttgtctgagcacggctgtgagaggtattcagaggattctgtgggcaggtaatgttttggtttcatgagcaggagcaaaaatccagaaggctttaacacttcagtgcatcccaaggcacccctattgagtattgtatagaggatctcaaaagataacagccacctgaggaaggaaagcagctcatagcagactgagctgtgtgaggtctgcgaaatttatcaggcccagagaggcatgagctttggacttcagtccttcccctgcatccattcccaggggcaattattttaagacatttttgttcctgagtagccgcccagcccattaccttcatgttcctgtaatatatgaagcaaagaacaatgaatagccaattaataacatattatttcaatgtaaactctagaaactatctctttttttccttaaaaactcacttgtaactgctacagtgagagtgtatattcaggacaacttgaatctatgttcccaggtggccatcttcaagctcagataaactctatacttaatcataatttctgaatcccattgtttaaggttggtacaccacaatggcctagcatccttctgttccatgagagcaatagacaccattcaaagggctattcctctccactctctagactctctttgtaccagcaagttaactgttgagcaattctttggtaattaaacaatcattacagcattattagctccacactctggatgacatctttaagcctctctcatgtgttaagcatgtctaatgtgtttttccacttttggataacttaagagaccaaaatataccacctcaaaatatgcctctttggcataagcattattttgagccaactatttttgagaaacagcagacaccggagaaacagagtagaagttactcttttgcaaggaagacttacttctataatgaaaatctccttttgtaatgataccttcctttcagtaccaggaaggaaaggatggctaaatcacaaaagactcatctatggagaaagcaccaatttaaatctgcataacaaacctcacccttttctatcatgctttccctggtcacctccccaggactggcttcccccccagtcttctttctttgttttagatgaagatggtatttaagcctaaattctaagccatttcttttatatttccccttttttcctgagtatctcccatgcacacctaaagaatacatgtcaataaacttctgtttgttttgtcctttttttgtttgtttgttttacaggggatcctagctaaatagaagagtagaggaaaaacgactgtttcaacccttaccgtaatcaactttattgtgataaagattcacatattttgcaatatgtcttatctttatggaaattaaaaaatccaatcacagaatcaaaacttcagaaatatagccaaatataagtggaaatttagtatacaataaatgcaacatctcaaattagtggagaaaaatagaattattaaaaagcagtattggaaaaaccatatacctatatggaacaagataaaattagatctattcattacattcaataccaaaaaattctaaatatatcagatatttaaatgtaaaaaaaagcaacaaaataatttttaaaacttcgatgaacttttctattatctaggaataaagaaatgttttcctaacataaaattttaaaacgtaagagaaatgtttagtaaatttaaataaataaaatatttaagatcttagtatgatcgtgtcagaggcatttgaaccagtgtgactccatcttgagtaggggctgggtaaaataaggctgagacctactgggctgcattcccaggaggctaggcattcttagtcacaggatgagataggaggtcagcacaagatataggtcacaaagaccttgctgataaaacacgttgcagtaaagaagccagccaaattctaccaaaaccaagatggcaatgaaagtgagctctggtcatcctcactgctcattatacactaattataatgcattagcagtctaagggacactcccaccagtgccatgacagtttacaaatgccatggcagtatcaggaagctaccctatattgtctaaaatgggaaggaaccctcagttccaggaattgcccaccccttttctggaaaactcatgaataatccacccctttttagcatataatcaaaaaataactataagtatccttagtccagcagcccaagctgctgctctgcctatggagtagccattctttattcctttacttccttaataaacttgctttcactttactctgtggattcaccttgaattctttattgcttgagatccaagaaccctcttttggggtctggatcaggacccgtttctagtagcaatagaaaaaataagcaaatagtcaaatggcaaaacaggataaaatatttgcaatgtatatttcaggcaataagtgaatatacctactacataaaggactttttaaaatgttggggtggggaactaattactttataatagactagaattatgaacacacattccacagaaacataaacacaaatatctccttaaaatattttgaaaggttaaacttaactcgtaacttggaaatgcatattaaaagtgtactgagttttgtgtcatcagacaaaaaaaaatctaaaagtttgatgacatatttggttggtgattctatgagaaatgggccctctgataaattggcagtgtaagtgcaacgtggcacaacccaggaaaggaaaatttggcaatatatagtaaaaccatgtatatagttatcctttgacccagccatcccacttctaaagaccttgcccaaagatgtactgggaaagaaaaaacaaacaaacatgaaaagccatgttaaaaggctattcactgcagcactattagaaatagcaaaaacccagatgctcaccagtagggagtcggttgtacagagtacagtgcacaacacaactgagtaccatgcagctgtgaaaaggaatgagggatctcttcatacactatatgcagtgacctccagaatattgtcaagagagtcttaaaaaggagagtcatgtgctagtatgctgtcatgtactaaaacagaaaaatacgaaaactaaaaaggggtgatatctatatattcatcaccccctttaatatatagatatagacatagatcaatgtatgtatatatatatacacacacatagataatgcatgtgtgatttccttatattaaaaaaggaaagataaaaatggttactgtatctgccaactatatctacaataatgctacgtgacaaactaccctaaactcactagcttaaaagaatagccatttactcccaagttcccaggctgtgggtcacactgggtttgtcttctttctttgagatgtgagtctagggtccgcaggagaagctttgctttaggctgtgggtcttcaaggcagcaggtggagctctgcttaggtgtctcacttggggacccagctgaaagacagggctaccagaaatgaaactgcctttgcaaagatgatgacagtgagaaaagtctagcatggctgactccatcttgcttccagcctcacaggttggctgtctttgctcattcctgcagaggccaagctaaccacaggaggaatttagtttatagtttaactttgaaggaaggataataacagtctctccctaaaactgattcccccttgtttaggggctgaaaccacctttgtaagactaacaaaaggccacaagattatgggagaagcctgaattctgctaggatatagttgtagtttctataattccttattgctcaggagtcatgtggccagaggtcactagatttgtaacttccccagttgctccaacaataccactattatagaacctaagattggtctcttgatatattttttagacttttgcattctggcaacagactgaccccacctggacttgtgactcataactcaaccggtcctatggcccctacccagaggcagacacagcacatgaggactgttttccacacacctatgatttcatcaccaaccagtcaggggcacccattccctagctcctgcccaataaactatctttgagaaaccctaacctctgagccttcagaaagactgatttaagtagtaacttcagttctcccatgtggtcaacctcgtgttaattatactctttactgcaacttcatagtctcattggactagttttgtctgtgcagtagacaggaagaactcatcgggcaattacagaaacacagtcttcctcatggcagaagcagctcctggaagggttaatagaagcatgacacactaagggttgggtttagaacacacacagtcacttctgcctgcattccactggcaaaatcaagtcatcgggcctggctcaacattagcagggtagggagtacagttctttcatgaaggtagggtaggggaaaggggtgaatatttgtataatgataatataatgtaatataaataggtataaggaaggtagaagattgaaagcaaaatcaatgttcttaattgtaaattcaatgattgacataatccaggggtggtaaactgtgacctgcaggctaattccatcccaggtctctttttgtactgcacatgagctaagaagaggttttacattttttaaaggctttgtggaaaaggaggaagaggagaagaaacagagactatctgtggttcacaaggcctaaaatattaactgtctgactctttacaagaaactatttgatgactcctggcataaccatgcacagaggaaatattctaaatgcttttgaacacaataatttgattgcatattcccagtggaatctactttctgataaaaagaactttaaaaaagaatattaaactgttttccatcatatttttggtattagcaatggtattgttatgagattatcatatatgtaatatagaattaagcaaatgattaaccatgtggtttttttggaaatttgcatttttaacattggggaaaatacagatataagatcaataaggtaaagtaaaaccatgtagtcttgaatttgagttaagagtagcagtgtgacctcattttatattttatcttaacatttttttttcctggatccttgaaaacaatgacaaagcaagtatcctaaaccaatagaaaggtagcccatgttcctggtttggaagactcaattatggttaacatgccgtttctccccaaatttatccaaaattcaatcagtccaattctagcatcaggaatttgcagaaattgacaagcagattctaaaattgatatgaaaatgccaagtacctgaaatattcataataattttttttaaaaaagaaacatttagaggattgacatctgatttgaagacatatataatatgtattgatataaagctgcactaatcgagaaagataatatttgtgtaaaagataaaacaaataaatctatggaacagaataaactatccagaaatagatccacatatgaatgatccaatgatattcaacaaggatgctaaggtaattcaatggagaaaagacagtcttaacagcaattgctgccagaagaactacatatccatatagaaaaaaatattaatctttcctttacaccatataaaagataactcaatgcatcatagacattaacttaaaaactaaaactataaacttctgaaagaaaacctagggaaaaaatctttgcaaccttggagtcggaaagttttttttgataggaaacaaaatgtatacgtttcaaaaatctgctttttgaaagacacctgtgatactggtcttcaacccggttttctgacatacaactctttttgaagattagaatctccaaaatgatgtcttttgtatgctaatgagttgactggtagctgggggaccctaggtagcttcagaatgggggcagttatcagaaagaccaaggcagggttccagggtcaggacttttagccacaccccacaaccactgggaagagaagagatgctgagagttaagttcatcaccaatagccaatgatttaattaatcatgtctatgtaatgaggcttccattaaaacccaaaagaacaaggtttggagagctttgatagcggaacatgtggaggttcctggagggcggtgcgctcagggagaaagtggaagctccacgcctcttccccactacctcgccctatgcatctctttctctttattctttgcaatatcttttataataaactgataaacataagtgtttccctgagttctgtgagccactctagcaaattaattgaacccaaaaagggggttgtgggagccctgatttatatagctagtcattcagaagttctgaaggcccgaacttgcaactggtgactgaagggtgcagtggtccccctcacaggctcagtgactgagctcttaacccatgagatctaaactgtctctaggtaaacagtgttgaatgggaggaggcccagctcctgtccactgcaggcttgattacttgctcactggtggggagaaattcccacacgtttggtcacagaaatcttctgtgttgattattgtgtggaatgacagcagaggagaaacagcttgagtttttccaccttcaacaccatgaagaaaattaaaaggaaagacccagttcaggagaaaatattctttaaacgttcatttgataaggaacttgccttaagaatatatgaagaactcttaaaactcaatttaaaaaaaaaaactttgatttaactttgatttttttttttttttttttttgagatgaggtcttgctccatctcctaggctggagtgcagtggtgcgatctcatgatctcagctcactgaaacctctgcctcctgggttcaagcaattatcctccttcagcctcctaaggagctgggactacagacacatgccaccacgcctggctaatttttgtgcttttagtagagacagggttttgccatgttgcctgggctggtctcaaactcctgtgctcaggtgatccacctgccgcggcctctcatagtgctgggattacaggtgtgagccaccgtgcccagccaaactctaatttttttttaatgagcaatggatttgaatagatactttactaagtaatataataaacagcaagtaagcacattaaaaaacctacaatcagatgatcttcaatgggtgaacagattattagcacatgatggtacatccataccatgaaatcctactcaccaataacaagaaatgaattattgacaaatgcagtaacttggatgaatctccaggtaattctgctaagtgagaaaagccaatccctaaaggtcatagactatataattccttttgttccatattcataaaatgacaaaattatagaaatggagaacagattggtggttgccagggattggggacttgtgggcaggagtcagggaagtgtggctatgaaagggcagcaggggggagccttgtgttaatggacgtgtttggaatcttggctgtgctaatgtcagcttcctggctgtgtattgtactatggctttgtaatgtggtaccatggggcgtaagcagggtaaagggtgcacaggacctttctgtatttattttctaaaacttcatgtgaatctacaattatcttgaaattaaaaatttaattaaaaaaagccttgcacataaaggggaaaaccaaagcatgtgtaataccttccctataggcacactttctcagtggaaccacaaaactgataggggaaagtttcgttttatgagcatattccagctgacaaatgaagaaggtgcgatgagactagactatccccatttggaaccttctgtgaggtgacagattatgatgtaatcattgatggctgttaacatcacacaataaggccttatgaaactcacacagcaccacctctaaagcagtcttgtcacaaaatattaaacctggacctgatcaagcatctggactggcttatggatatagagaaaatgtaggggatagatgagcacgggaaatgtctccgtggggcaaaattcacgaaattcagattgttggacactctccaggacaaaaggtctagattcttcaaaaacaacaacatcgaaaaaaaaaaactgccagaaagaaaaaatacagagggagaaggtaaattaaaagaaacataagagttatacccatcaattacaatgagtgggtctgttttggccccaggttcaaacaaactgtaaaaattttaagagcagccatatgacaattgggaaaatgtgaacactgaccccatgtttgatgttattaaggaattattaatattttaggtgtaaaaaattgtattgtgggtataactttttaaaatcaggtatttgtacctcatttgtacatttgtacgtttgtacattgtacattttgtacaattgtacaaaaacatttgtatagatacatactgaaatatttatagatcaaattataaaaatctgaattggccattcatccataattgttgaagctgggtgatgagaacatggggggtcactatactattctctctacttttgcacatatttgaaatctgtagtaaaatttttattttaggaaacataaacaaagtaatttaatattccccatattggcctctgcaaaaataatatctcatataacttggggagcttggagctttttatgcatggcataaaaatgacaatgtacatccctctccctgcaggacacagaacacatttatgagtcttttcaccctcatttcgttgaagattttattggccgaagaaccctcagtaggcacgaaattcattctcacaagcagagagatgcattatgctccatttattgctcatcctaaattataaacatttccagtgaatgtaaaggaagatatgattgaaaaggactctgtgaagacaggatgtttctgtacagtccttgtatctgctcacctattccaaactttccagagattttaccagaggtttaagatattctcctgagggtttgctgtagagagatttttcttaactaaggagtgcaagtagcaagcaatagcccacccagttggagacaaaaaagaagggtgtcagtgttcccactgttaaaaaacaaaaaaaaatcaccctggacacctctgagaattatacaaggggatgtacacagccctgctttatttgagttcaaaaggaaggtgggttttgaaagaagaacaaggagagtagatctctctggatcttctgatgctcacagcaaagagctcaaggtatctgagtcaactcttgaggcttcttcgaacagagggatgaagagagaatatggcaagcttgccaacagatcccagaagttttaagagaaaagaacagattgctctttgcaaaacaaaccgagctgggtgcatggagccccagtagacagaaagtgaagaaaacatcaacgttctgaagttttagataggtgcaccatcccttatggataccaatctgtgctccccataaacttctgtgcccagggtcaactggccagggacaactggctcaccaggaggcctacatagcctcttcttcaggccctaattacagctctatgcaatagggactctgccatctgacagccaaggaggtggttcggtttctgcacatggttttttccgctgggtcccttgaggtccatggtaacctcttcctcattctctacaggcagatcacactttgtaataagatcagaggcagagaactttgaccagatcacactttataataagatcagaggcaaagaactctgaccagatcacactttataataagatcagaggcagagaactttgacaactatctccttgccctctggccctggggtcagggctactcaaacaacacctgctgtcccaaacccggagaagtgtagattttggcactggtagaggaataacagctattgttgacacttaatcttgtgggcctggaatttcaactatgttttcacaactcggagcctattgctgccacctctgtcagggaagataaatgggcatgaataatagacagatgagtttcccaaaagcccagacaggctgcagggaacacgtaatgagcagacagtgtggttcacgccggggagcccaggtttatccaggcctcatcctcactccctttctctactgataattggacccaacaggaccattccgaatcatttttctctcttcagttattcttcagttctactcaaagggtcagtttagggcataattaaagtcaattactttctgaaaggccatcaggacaactgttagagaaaatgatagcagccccgcacttgctgtaggaattattagcttgtcagcctccaggcttatggagacaaaggatcaaaaagttagagagatccaggtgttcacctatttgttcactaattcttttattgtgagtgtgcatgtgtgtgggtgggtgtgacatttattatgaaccagagggcaggagccagtgacacagtggtgcagagaataatcatattccctgccttcctggggtcatacagcttggtggaggacacagatgtgaattcggtaatcactccaataaatattctcctacagatgaagaaagatgatacgatgtgatggacaacagagacttatatggtggggtctgggctggtctttctgaagctaagactggcaggatgagcaggagtttgccagacaaagaggagtggagttgttttccaaacacatctcagcacaaagtgttgtctttgctgggagctgaaaaaagatagtgtgggcagagaccattaggtgagacgcttgatatgagatacaacctcaacaggtggaagaagatcatgagagatgaagagaggaatatagtacagcagagaggacacagaagctgacgtcagggtgtctcagtttgaaaccagtggccaccctgttcctctcccatgtggtcccatcatgggcctctagggtctgggataagaggttaatgaatatctcataccctaagcaggggtggtccctgcactttagcaaaaagttaaggaactagggaaaagagatggaaataataaagagatgggacaaagactttgaagaccaaagcccctgggctattctcttttttaaatttttttatttaaattttcatttatttttatcaagatagggtctcactatgttgcccaggttggtctcaaacttttggcctaaagcaatcctcccaccttggcctcccaatgtgctgggattacaatgtgagccaccacgtccagcctcctgggatatttctcaatgaaacattggatgccaagattggttttgtgccacatgccaatttcacagaagccagtctatgagccaccagctctactcagcaattacagtttctggaactttggctaaattcctgtagatgcaccactgcttgtggcctgactctttgccacccaagtgcgctcagcctcccctggggagtctgccaggcttgcatggctcccactgcacttgctgtgctgggaccgaaaacagtttttgtgcccctagcttaactccactggattcatagaggctttggcctcctcaatggctgtcctgggacagggaggctggttagcacaattaacacaacctggtcatgcaaggcattgatggtccgtaacatgaactttgaccagtaggagacagagaatggaaaaaagccagcagataaatcatctggccttcctcccctatgacagactgttctgagccacagtgtttcacatgtcttcctggagatgtcccacatgacttgagcaaccagctggagctctggagaaactgtggccatcctggtaacatatgaccttgtatttgctttctctccttcctgctttatttccctatgtcccttactttggttgttgggattgcacctcccaataaagcattagcatgtccgctctgcttggggctctgtttcctgggttaagactctgactcttgaatgctgaggcattgtattgagaaggagttcaggctggactcacacctggtgaacaagagtgctgtggtgcgtgagtgagttcttccacaggtataagaaaagatacttagtacctgccacccctgaactatccttttacggcaaatgtttgcttaaagtcagcagtcccctaaacatacttgagatcacagatgaagcaaaatcagactatctcccaacatagaaaagcacaataggaaagaaatatttggtggtgagaagattatagctataagcaaattaggcaatccatctgtgagacccagcatgcagtatggtagaagttgaaaataaaaacatggataaaattgcttaatggattataataatatgcatgactgtgtgccaggcagtgtactaagactttcttgtttcatcccatttgcttattataacagtactataagacatgcactcttacaaacccttattttacagaggaagaaacaggcccagagaagttgggtaactcatcaaaggtcacagagctaagagtggcagagtcaggcctggagcccaggaagtctggtttcgaatttcatgcttctaacctgagcactgtactgcttggtggagttctctgctagtcctacctttcaggcagaggtgagcattgctgagattacatgcctgttcctgggggctaataccaggagggagattagactgttctgtctaatctgtagtttggctcttccatgagtcttgggatcagaaccctgaatcagagagagatggacactggcctaggcagatgtgatggtctgaatgtgtttcccacaaagcatgtattagaaatgtaatccccaactcaacagtgtcaggaggtggggcttaatgggaggtgtctaggttatgggggctccacactcttgaatggattaatgtccattataaaaggacctgaggctgtgagttccatctcttgctttttctccgtctttcgccctcttgccttctgccacaggtgatgcagcaagaaagctgccaccagatgcagccccttgatctcggactgcccagcctctagaactgtgagccaattaaatttttcctttgtaaattacctagtctctggtatcctgttatagcagcataaacaggctaagatagtaagacagtagggaaacaagctccagatgtacttgaagtctcttgttcttattttaggagttgaagagcaattccctccagtttccattagaaatgcttcttcttccatatcaaatattgtgagatagcctgaaacacctttcaacactttactacccttctccaaaattcaacagatatgatttccacggactttactcacaggggcttcagtagaagaggaagaggcttgggtttaattgaaggtggcctgagacatctgtgaggaacagcccttttagagacatatcccctacaaataaagcatcagaattattatcctaatacatgaacatccatggttccttcagcaccatcgtaatgcagagaccatggggagatgcagggagagggctctgcacagcatggccaacttgccgggttgaaaacagacaacctccatggagcagggacttcaattagttaattccccatccccactgtcacttactaacatgggattctgattaaaaattagattctctgcaagaggcttaacttataatttaagaacttttgctgtataaccattgcaaaaacaattacataaagattaattagcaaattcccaaaacagtagtaaacggcaaagtagtttaattaaaaccattatctccaaaatctgaacgttaataacagttgtagctcagggagaaataagaggcacactggcacagagtggggtaaagggagggtgtccttcgacaccagcattcagtcagcccaagtctccacggctgctgtcctgttaattacactccagaactctgtggccaccgcgtcttgagaggccctgggctcctcctatgagcctctgcagctgtagccttgacgaacttgtcattgctggcctgcctccaacaagaggcctttagccctcagaagagagggaggcagcagggggcacgaacaagacttttaagtggggaattcataaaatttggaattgtcagaaaacatctgtaaccatgactcttgtccttcagaagacactgataaatttaacccaacccagaccccttaacacaaactctgaagtaaaagattggcaaaggaagcccatgagaatgaaatgtaacaatagcaactatgtagttagcacacacaccatatgatctcacacattcacaagatcctcatgaagccacatggccttcattctgttattatttacttatttatttatgagacagggtcccactctgttgccccagttggagtcagtggcacaaggcagtgtgcagtgctcagtgcagcctctaactcctggctcaagtgatcctcctaccccagagtcctgaggggctgggactacaagcacatgccactaagctcagctaattttttttcttttttaattttttgtagagatagggtctgactacattgcccaggctggtctcaaactcctagcctcaaatgatcttcctgcctcagcctctcaaagtgctgggattacatgcgtgagccactgcatgctgccatattatttttattcttaagctaaagtcactcacttagcctcgtgcatggggacccttctctttttaactctaaagcccatttgtttacctggataccacacagatgccctttgtggtgcaacatttagcccattgaaggctaattatgtgagtctcacaattgtgtgagtctgtcatgaagtatagcctagacttgacaatgattgatttctccaaagaaccccttcagcagggagatcccaaatcagagagcccttgcccttacccaggacagccaatgtctctgcagctccacacggagcaccagctaccgtggaggggttgacctgggcctggagtccaggacaggctgaggaatgcccttcccccagccctctccctgagtgtcagtccctgagttagacactgtcacaggagagggcttggaagccaccttctgactcaccacacccatcccagccatgccccctcaccctggcaagcacccaggggctgtatgttgatttgtctctcccctaatacaaggccctgacctccaccagcagagccagactgtctgcctgcaagcctggctttttattctgctgcactacagaaattatgcaaatcacagctattagtataacagcttttgcagaattcagaagaaaaaggcaaaaaaaaaaaaaaaaaccacacaatcacaaaatccctatgtttggttaaaagaccatgaatttccccattgtcctcactcactctcttgtcaatatgagatgtatacatctgaagcctgcttttcagtcttatgaacatctataaaagagacatcagtcagcagaaacctctggtactgcgacatgaaagagaatgagggaaaaacccaactctagccaggatggagaagagaggaaaggcaagatgtgggaggcagccccagaaggcccaggcggggtctctagaggaacctaagaagactctggtgtgggacaaagctccaatgtgctctgagcactctcgctgtccttccagagggcctcgttccccttctcattcatctcactcaccacactggaaggctcctgaaggcagaagctgcacacctgtgccccgtcccttccacagtcctgagcaatgagcagtcacagagctggggccgggggagggcatggagaaattgagctcctttgctcaccaacatttcagggagaccgcagtggtcttggtggatgtgaatggactgagttgcttctatcactcaaaatccccgaatgaacaggtggcgcatggacatcagaggattcaataacctgacaatttgcaaagatttcggtggaacagtgacaccagagggaggagggagcacatgattccaggcgctcagaaggaggaagctgcctcaagaggagggactcaggcagcccgaggtggccctgcagggaggacgcaggaggaatgaaggccctgtctccctcgtctctccttctgccctcctcccaagggcccccccgggagctgagggagcagaagcaagaaagccatctgggtcatccctccaggtcacctcccgaggcacagagcaaggcagaaaacttctgggccaggctctggcaggaccacttgcatttactctgtaagatgaagacaatggtcctgggagagcatagctgaccacctggcaccctgggccacatcgccttccagctctcctctcatctgaggtccatgccagctcctgcccctggctctggtgctgtcccacctcggggtcattccactttctgctatggggccctgtctgatttcatgagacacctctaggtctgcactaagacagcccagagttatgggcttatcaacgctggggataggcagtagcagatggtggataaaccaccctgccttccatctttcaggtggagaattctggaagacatcctgtccatgtcttggtgggtcctggtggacttgaacccctgctgtccatggcagcaacttaattcatctgccttccctgtctcactgtccttataccctcactctcatttcctgcagtcaccctcaaataagcaacctgcacccaaggcattttctggggctctcctttttgaggaactcaactaagtcaagtgaaagagccagtaaatggcaatgagacagttgatcaccgagataaaaaactataatgtcagattgctacctcttgccatacatacaaaccatttcttgatagattaaaaagttcagtgtaaaaacccaaagcctaaaatgtttaggagcatatatttatgagcttggagtagggaaggatgttttaaacaagacataaaaactgctaaccactaaaaaattgatcgtgattaagacctcataattaagagcttctgtttatcaaatgataccataaagaaactgaaaagcaagctatgaactagagaaggtatttgcaacactccaataagggatgattatttaatatatcctaataaaaatcaataaggagaaacatttttaaattgtaggtcacagaagaggataaatatattaaaaaactcaaaattagttatcagaaaaatgcaaattaagacccaaagtaaccatcaagaaaggcaataaaatgtggcagttgagagcaaagtcattatgtctggtggagttgagccctggcttaatcccatgggtgccagctatgtgatcttgctggcatcgcttccccactctgtggacaatagctttccatgcattaaacaggaataacagtagttcctgcctccttaggttgctgtgttacatggaagaagacatgcaaagctcttagcatgggtacttcacaaacagtaaacatgcaaactatatttaaaaaccatctccaggtgactcagagattacataatgggtgcttaataggagcacaacagtacaggtttttattttgtgtgatccaaagtactgcacttaaataacatgtgggtgacctccacaggaaggaatgggttctgccagcggtgggtctatgtaccgtactgcagcctcaaacacagacgaatgcgttagctgcatgtgagccctcatgataaaagagatctgaaaataaattgtgtatttaattcagagcgactccagagctgctgttctgggattgcagcagaaatcctggagaaagcctaagatttgggattttagatctttatgcatcacttacatccacacagaaagggcgttccagggactgcgcacccatagagcagtgcaagctggtccaccctgcggaagccaagacctccctgagcaggcagccacgctgaaggggaacagcagctccccgatggcctccaaaggactcaacacggaaagtgaagatatatctatggcctgagacaattctggcaacgatattcatatagacattacgttcctgaacagcaagggaatcctgtgaaaggagggaacagtgaactagagacccagattccagccctctctactctgaggagtctctatgacacctttaaatcagggagaatcatttctagacttcctggggttggatcgaggatccccagaagcaaccaacttgtattcagcatacaccagatgccagacacggtgtgaaattatttgtatacattttctggttcaatccaaagaactgctctatgaacaaagctaccaggacctgcagaggattaggtttaggaagtggtgaagctggtatttgatcaagcctaggtgaagtcgtgtttgagaaacagctctgtgagctgagtacaaccagaggattgtttccaaagttaggcccaagtgggcttccaagagcaggcatcaccactaaaacaaaacagtgacactcaaggcattggaggcagaccccaagcaaacctgcacgtgttggaaaaggcccgaggccaggaggaggaggtgttctctgcagctgctcagcctgttcattctgcaccaggagcagcgcaagctgctaggataccctaatggggcaagcagggcacttactccaggctctgcagcaggaatgcccaccatggggaatgcccactatgcatagccatctggggtctcatccttcaagccacaagcctgctccacctgggccctcaaccccactcttaaggtcggagcaagtattcacgcttaccccccttggaaatgagggagaaaatcgcccatggtgtgtaggggtttgtgtgtctgtgcatgcgtgtgtctgtgcatgcatgtatgtgtgtgcatgggtgtgtttctgcatgtgtgtgtgtgtgtgtgtgtggctttagttgataatggcagtccaggtctgcaagtctctaaggtgcaggcccacatctctctagagaggacagtcagaaccacattaatcgttgcgtcgcaggtactccatgcctcgcgctgttctcagcacctcacataaactaattcacgtacttctcccaataaccctatgaagcaggtgttatttttatcctgctgtggcttatggaaaaatgaaggtgcagagagattttgtatttatccaagattacacaactaacaagtggcagcgtgagatctaagcacgaagagccaggctccagagtgctttacctgagatggagacactctgaacttctgccacctactctcatatgcctgggtgatggaggatacacaggaggctgattttaattgtacttcctgtgaatgcacaattcaccaaaattgtaagaattccatccaatgtgaaaagcacacatttgcaactcactggggtgtgaaatgtcatgaaaataaaatagtgatgctgccctcgggaggttcaggacagaggcgcagtcagggttgcatgagggctccaggaaccctcctgaggactgaaggcacccctggctcccatgccccagacctcgaaagcccagtgttctggctcctgacaaggcaccggggctctggggacaggttctctacttaggaacaggctgaaggctggctccactcatgccactgccaggtacacactctgcttggtgccaggaagatctcataacaggaagccctcctggaggggaaggaggagacgctacagtccaaagacagtgtggagagaacagggggcatggcagagaggggcgaggagaggcgcagaagggctggagcctcggccctgagaagagcttgggaactgcccttgttcctgcgtgcgttcagttggccaactcgctactgaataccactgtgttctgaggcctggggagaaagtggatttaaaaaggcaagcttcctgcttgcatgaagctaacattctagaaaagaagacaggccataggtagaccgtcccgctggcctgtccaccgtcctcatctactcctctctctgaaggtcaaatagggccactctgagtgcagcacaaggggaggggaagagacaggcacccccagatcaccaaagacgagttaaaatgagagaaatgggcacactggaagtccagtccccaccgtatgcaatattcccatggagcaagcaagcatctaaaatataacagtattttttaaatagagaaagaggcaagaatagcaccaggaacacattctgcagagaagtgagccctggtatgtgctatgttgttcaaagaaacattgcagccttacctgacattcttaggtattccctggcttctaggaaaacctgttactggtgagcagacatcagggcacagattgggcctggtgtcacagtcactgtggccagggcttctggctacagtggttaagtgagcccaggaatctgttctggccccatctaaatgatgttattttaatgctagatttccttgaggtaataaaacaaaaacagggaaactgagggaaaggataatagacataaatcactaacctaggagtccaaacccccatttaaaagtaactcagaaggttaaaataaaaaggcagatgtaggggcggtgttgaaatccacaaaatcaaaaactttgctgtgccaaagacagactcaaatccactgattgccagggtctctggagccccagctaaaatgaatgaggaaaggccactacttccaccagggagggcaaatatgcgccccttctagggccagttctcccagagagctgctgggaaccttggactcatcttccctgtgagaaaagaggctgcagtcagctcagtgcccaccaggaggaccgcagagaggacagtgaccaccgctacgggtgtcattctagacctagtcgatgttttggaatctcagagaaaatgaaaatgcccatagacatctacacaggaaaagaaataagaagaaaatgagattttcttattttttaaaaataagaagtttaaaagaaatagaaatctttctgacctcagactcctctgcagtgtcaagtgtcaggaagcagtggagtcctgtccccggaaaactgggaggaagaagtgtagcaagctgcctgtcatgtctgagaggaacagaaagggcagttggagaagtggagaaagttaggtgagaccagcctgtggaaatcatgagaaatgacagagattaaatcagaaactcacacatttggaaagaagaacattaacatgatttagtaagttggagagttgaccctttgaagaacccaataaaatacaaaactttaacaaatctaattaagaaaaaatagaaataaagaaaattggaactaaggaaagagacgtaacatatgctgataaaagtaattataattatgagataatataatgcacagttatatgctaataaattccatcaacatgtaaaaatggaacacttagtgaaaataataaattaggaaaaatagctcaagaggaagtagcaccctagaacggagccatagccatggaagagatgggaaagtgttgttagcacactgccttggaaaatatttggaggtgatgagactttattagtgcatgttgtctggacttcatggaatatataaaatgcatactataaaatttatagcagaatatagaagaaaatgaaaggcaaatccatttactttatgaagaaattctattaaccaaatttggcaaaagtagcatgaaaaatagactcgccagcacttcccaaaatacagtggcagggaggcttttcttaacaataatggcaaaggaagaaatcattaggaacaagatggatacatgtaattaagtttaaatggaaaacctcgtatcagaaaacactgtagtaaaattccaagggaaatggcaaaccgaaaaccatttgtaagaaatacaagaaaggattagttattaacaaattaaaaaaatcctctcacaattacaaaaacactatataaccacaatagacaagtacattgagacaattatacaagcaacataaatgagcaataagcatggaaaacaaaggctcaagctcactagaaaggcaaagaattacaagttaaaatcagggtgtcatgttttagcctattaaattggcaatgatataagggttctctgccatgggcaacaccgtgcactgataatggaaatataaattgatgagacatttttggaaaaggatgtgacaacattttgcaagagttttaaatgggttcagacgccctttgacctggtaattccactgctgggaatctattctaaagaaatggtcaaagataaacagaaaatgcatgttcttccctagcacagctgtgagttcccctaactcagaggccttcctatcctcccatggactcctcctctatccgatctctaaacacttgggacccaggacgtagtacctgggactacttttggccacactcttcctgagggatctattactgtcccatagtttgaaaaagtcatctgcaccttgatgacttctagatatccatatccagtcccaacttctctgagttctagacttgtctatccagcagtctagtagacccaaattctctgagttttagacttgtctatccagcagtctagtagacccaacttctctgagttttagacttgtctatccagcagtctagtagacatcactacttgaatatttaataagcaccccaacgcaacaggttccaaattaaactgctggtcccctcccaagccttcctctcctttcttatctatttcagtaaatggcaccactgtttacacaattgcttagaccaaagacctacaggttataactgagttatctcttgctctgccactttacctccaacccaccagtgaatccacatcatgctcccttcaacatcaattctgaatgcagccacccctcaccaactcttctgtgactgttcacatccgtgacatgcacctgaaacagtgctctaagctcctacctggcctccctgcttccaatccagccggccctccccagtcatgagattctccatctgcagtcagagtaagctgcttaaaaacctgtgactctcaagcttccttcacacttagaataaactctgaattatttactttggccctcaagaccttgattgtgtggtcactgctcactttcctagactcttgctgtctctgctctctctggctctctctaaaccaaccacactgccccaccactgtcctccagtggccaagttcattcttgcctcaggcatctgcacttgcctgcaacaatccacacctagatttaaccagatttcgcctgctctggaaggacgttcctggcccctgggtgaaaatgacttcttccttttgctcctatttccatcaccctctagtccctaaatccatctcacttttcctcataacgctgatcacagcctgaaatgatgtttgctgcatttcctttccgttttctgtctggaatcccctggggatgggatctcatcaaaccccatcatcctcactgctgtctccagcacctgacacggaagagacagcaaatactcgctgaatgagattaacagtggtgaaaactgaaaactgcctgcatgttcaaaaatagtgccatattttttagaaatatagtggaatctccataaacccattaaaatcgtgttttcaaaaaaaagttttaaaaggaaaattttcattgttaaacaaggtaatgtgataaaaagtaagatgcagaatcatatattttggtgatcccaattttgtaaaattatttatctagctaggtatttaaatataaagaaatacactaaaacattaataatgtttggatttgtataatagaataacaggagactttttattttattatttatacttttgaattttgcaaattttattaaaagaaactgacattgatggacattttttctatttttttttattcatttatttttgacaatcattgtgtgtatttagtgggtataatgtgatgttttgatctatgtatacattgtagaaaaattcaatcaagctaattaacatatccatcaccaagttatcatatttttgtgttgaaagtgtaaaaagatctatttttagtaattttgaagtatataatacattcttattaactgtggtctccacacatcaaaatacatcagtaaaacttcctcttgcagtaaactttgcactgtctcatcagtgtctcccatcaccccgcccctcacctgccccacctctggtcaccactgttttgccctctatttctatgcagtcaactttctcagattccacatatgagtgaagccatgcaggatttgcctcctgtgcctggcttatttcatagcataatgtcccccctttccagccacttttatagaaaaaaaacttcatactctgaagtgagagagaaaaatgactcctgcctggctaacagccaggagggaggaaggtgaaggaggcgggtgagccagttctagggctggtccagaaggtggccactcttgaccaagagatagacgggagtgaggcagcgggcctcactggaggagcccgcgccattctcaggagccatcacggggacaggagatgcacacacttctctggtccttgacaaatgaacaagtgaacgcctcaatggtaagtccacgtagcccataagagaggatactccaggatgccagtgtggcagaaacagcaaacacagcctctgcgctccgcccccgtgcaggtttttttgaccacaggctcctcacagccagcctgtgagcaaatgctgcctcatgtactgtgcacagagaggccacagatgactgtggcctctgctgattactttggaattaaaaacaccatgagcccaggcctggaaacacagaggccttttgtgccagttaagcaccttcagggggaaggagaggaagaggaggaggaagaagatggggaggaagggaggaagggaaggaggaggtgaaggaaggaaaggagagggaggagaaggaggaaggcaggtgaggaggagggaaggaggggcaagaagaagggaaagggggagagagaggggtagagaaagggacgacggaggagatgggaggaggatggatttggagatggggacaagacccctgcatcctggccctctggacactgtatcctaaaagctggagctgtttattatctgagtgatattatttggggggcattaaggaaaaatgagcagaagaaattgtgctcttgagagatgaggacagacagaaacttcagacccattcactaaaggctgaggatacatgggagggccaggccctggatgtgtctcaagaatcggggctgtgctctgagatgaccagctggacagccagaggccctggcttcccctgtgtcatctactgttggaccagcttattctagagcaatgtggaaaggaaggatgatggaggcagaaaaaaagaagaaagaggagagaaaggaaaaatggacagagaaggggaggtagagaaagagagaggcagaaagactgaaagatttcaaaggcaaactacagctgtgcatggtggtgcatacctgtagtcacagctattcggggggtggggggtggtgaggcaggaagaccacttgaaccccggaggtggaggctgtggtgggttgtgatcgcaccactgcattccagcccaggcaacagagtgagaccctgtctccaacaacaaccaccaacaacaaattgtttaaagtaaacctcctcagtatggcttaaaaggaagtaaagagaatggatcaagccatgcagggtcctcacctggttatcagagagaaatggacagcaagaggggcttctccgaagtgtagctcccaactctgcacactcaggcctttcacaagcatggatccatgtgaccccaacagtcctacagggtgtatggaacattccagcccctttgtcaggtgagaactgaggctttggagaggacagaggagtcaaagagcttcagcgggtagagccagcctctggtcctgcacaagcccacaggtgtgtggaaggagatggaggtaaagcacctgccgggacaggaagggcctctatggattagggatgtttccaaagctggtcagagagctaggaccagagtgggagggctgcagctgaaaggtagtgtataataggctttgggtatttgtgttcgtggttgggcgggtaatgttttccatttccagatgcactgcagcctctgcccacacatcaacacagaaaccccgccatttggaaggtgttctgtgcagacacctaaacgtcattatcccaaaacaccaagccagccagccaaggcttcagaaagtacctgaacagctgagcttgctgttttgatgaaacgctgtttgacagaaaaacaggccacccctggtaatatgtagagaatgataggattcatgaatatgcatgaagtcctctttctagagacaattgccgcagcggttattggagcagaacaggccgggtgggaagacagcttattcccaaagccactctgcctccctgctgggagtatatggaacttaagatcatttcctggggccccatggtgtggtctcagcactacctaggcccacagaggccctctgagggccacctgatgagggccacctcaccctagcccaccacacattggtcagagcagaaaatagagctgaaagggaagaatgggtttgcccaaggtcacacagcagctcctgacggtcaggacctctgccaccaggtcaagtggcccccacattgcaggcccctgggaggacacagatgcagaccagaatctgagcagaggacagctctcaggacagctcagctggcatgcccaccctgcaggggaaagactgcccatgcccacactgaggcaggggaaccacggtgaggagctgagtgaagaccccccacagagctaggcccaggactcccagggggagagtgtggatgggtatctgcctccaccccgagctgtctgcaatttctttccatgcaaaggataaggtctgaccaacacagtcacaacaaggcatgagtgattctcaggttaactctacttttgaagaagaagaagagcccacaaagaacttaaaacagaactaccattcagcccacctatcccatgactgggtatctacccaaaggaaaatcaattgttccaccaaagggacatctgcacccgtatgttgatcacaacactattcacaatagcaaaggcatggaatcaacccaggtgtctgtcaacagtggactggagaaagaaaatgtggcacatatacactgtggaatactatgcagctgtaaaaaatgaccaaatcaggttccttgcagcaacatggatgtagctggagaccattatcctaagcgaattaatgcagaaacagaaaacctgttttcacttataagtggaagccaaaccttggttccacatgcacataaagatggcaacaatagccgggggaaccactagaagcgggagggtgggagaggtgtgtgggttgaaaaacagcccattgagtaccatgttcactgcctgggtgatggggtcatttgagcccaaacctcattgtcactcaatatacccaggtcacaaacctgcacacgcagctgccaagtataaaataaaagtggaaattctaaaaagaaaaaggagaagaggaagaggaaactagaaaggcaaagggaagagacagcaatagtggatgatgctcaagtattccatagattaccccagccacacccctagtccactggcagcaacatggtccaaagcccgaggtggccgtggcaagagccacacccctggtctgagtccccatgcagcctccacacttcagtagcaggagcaaagctggaagtcagacattttccaaagaaagccaggcatgcttggacagtgggatctggccactgtcagcatccagcgcctggtgctctgaagtctgaggagagtacagggcaggacaaacccgctgtcgggtgcatctcacactgaagaggcaggggacagcagttccctttgatggagctacgcagatctgaggttgctggaagcagcaacccccgtttcatctgcttttgaaggagtctgaggtagacggctggcgggaaggccacgccatactgagcacaagggccactcacttgcagaacctgctgtgaagagggaatccaaacccactttgctggtgcaaatggtgctctgcaggcccagggcgaggagaggccatctggagttcacaggcatttaggaagcagagtggatacatgaggagcacttctggaaacctgttttgtaccacggcaccccagagacctaggagtgatctcaagctctgccactttggacaacgtttttgttagctctctgggcctcattctccttctctgcagctggttgcatgccgtgtgttctgccagctcgctgcctcattcacactggccagtgctctctgcccaagagcttctctgcttcatgtgccaatccagagatgccagggatcgcgcaccttccgtgacagccctggaccgatggggatggagccagtggatagatatgcccccaggttcactttccttccttctgtcttcctgtcttcccagttctctatcccaaattctctaaagtcacttccaaaaatcaaccttctgcccacaggcccttgtcccaagttcttgggttctgagaggaatccaggctaagactgaaagaactacagacccacaggagttccagccatggcattcacgaccctcctctgctgagggcaggctggggttttacttccccttcttgtctgtgggtgggcataggtggggagaggtgcaagctcaggagctgggctattccatggcctcgccccacctgggagttatatcatggattcctgggtgggtcttccaggaagagaaacggatccggaactgtggacgcagggtcgactctctgaaatcccttctcggggctttggaatttgtggtcccttaatgcttcagtctcagcagcgcctcgacagtcatgcctctggccttcccaagacctctccccagcatgatgaagggtctatgctctcccagcatctcctccaacagaaatggtctctgcctctgagatgtggcaatacagagaccgtgcatcatggggaaaatgaacagaagggagtaaccatagggagccagctggttcagggatggggcagagaaaatagaggaagagcctggagtatcctgtggccactagacagtaagaaagtattaaatagccaggagatcggacagcctgggcaacatagccagactctgtctgtacaaaaaataaaataaaaaatagccagctatttgggaagctggggcaggaggataactggagcccaagagtttgagactgcggtgagctatgattgtgccactgcactacagcctgagcagcaaagtgagactgtctctaaaaacaacaacagcaacaacaaaaacatatatgtatgtgtatgtgtatttcaaaaggctacaggaagcaaaccgaaggggctccgaatggccaaagttaggacaacttgagcaaaataaataactatggtattgaattatagcccaagacataatgtaaatatccataggtccatcctgattaaatgcgtaactgaatacataaataaatgagggagaagcagcaattcttccttacagaagaattccgaataataaatgtagaagaaataagggaagtagaaattcatcaatagcacaccacagtaataattgttacagccaagatctactgatggatatgaaaatgagtgggggaaagtttaagcaaaaacaggatatttacataatctcaaatatctgctttccaatacttagtaatttcaagataaaaatagtaagtttgcagtagaccattttggtagataccaccttagccaagtgatcaaggactcaccaatagtaagacacattgaagtgacatcatgtgtccccaggatgaggcactaagaagggcaagtcgctgctgtgggatccttcccaataaagcataatgtcaatcaaatcaggagtaaaccagcagacacacccaaataaaggggcgttctacaaaataacttaccagttctttcttccttctcctcctcctcctccttcttcctctccttcttcttctccttcttcctcctctcttcttcctcttcctcctcttcttcctcctcctcctccgtcttcttcttcttcttcttttccttctccttctcctcctcctccttcttcttcttcctcttttttttaaagacaagatctagatctgttgcgcaggctggagtgcagtagcctgatgtgcagggacgcgatcatggctcactgcagcctcaatgacctcccagactcaagcaaccctgccacctcagtctgccaactacctgggaccacaggcgtgcaacaccacacccagctgtttttatttttttagagatggggtcttgctttgttgtccaggctggtctcaaactcctggctccaagtgatcctcctcccttacaaagtgctgggattacagatgtgagccaacatgcccagccatcttaacagtcttcttcaaaaaaaatatttttaatacaaggtcttgctttgtcatccaggctggagtgcagtggtgcaatcatagctcactatagcctcgaactcttgggctcaagcaatcttcccacctcaacctccttggtagctgggactataggcacatgccaccatgcctgactaacttttatttatttttattttttgtagaggtggagtcttgctatcttgtccaggctgttctttaaaattttgaagattaagaaagacaagagaagaacaagaaactgtcacagattgtggggcggagagactgagggggcaggtggctaaataacatgtgggaggctgggtcagatgctgaaacagaaaaatatttttatttttatgtaagaagtaggtgatagaagaaagaaaaggagagagaggagggaaggaaggaaggggaaagagggagagagggaaggaaaagagagaaagaaagaaggaaagaaagagagataaagagagaaggaaagaaggaaggaaagaaggaaggaaggaaggaaggggagggaggaagggagggaaggaaaagacagagggaaagaaagaaaagaggaaaaaagaaagaaagagagaaagagagaaggaagggagggagggagggaaggagagaggaagggagggagtgggggagggagggagggaaggagggaaggagggaggaaggcagggagcgggggagggaaggaagggcaaacaaaacaagattgttagaggaaaacccggtgaaatccgaatgagttctgtgctgtggttactagcactgtcccaaggctaatgtcttagtttcgataaacggtctgtggttatgtaaaatgttaacatattggggaactaggtgaagggtatgaaggaattctctgcactctttttgcacctctttggtaactttatcacaatattcaaaacaaaccctaactgtaaaaatatttaaaggagcaagagggaaaaatcacataaacatggacacttgtgcctgccattcccttggcaagtgtgagatcaggagtgaatctgtgtgcaggcctcagcgtgtaggcacctcagagctgtggccccgaaactcaagctggttatttcctctgtcgtcccagagaaggagcatcccacagttcagtcacgagatgagaatccagtggtctggagggatccagtgctcctggtctcccaggtgatcccctcgtcctgcactttggaccagggcctcgtgttctgagtggagaccgccagccgtgtgtcaggcagggttccacggtggcccccggggttcccttttcactgtccttaattcctgcataagcctgggcttggaggtggactgtggaatcaccctcaagctttgcccctctcctctggttccacgcttccccggggcccgaccgcttccctccaggcactcaccctgaccgacgcactcagcactgccacgcctgctgatgtccagtgacgaagcactccgagtgtttcagcctggaccgtgcggggactatgagggccatgtgctgtccttgctactccgatgagatcaggtagtgtagggttgtgacagacgtatttatattggtgtttgacaatggttcctggctgacaacctccgtagcccttgcaacagtcttttgtggtcatgttgggtgtgtcaggcctcaggaacaggcctcaggaaacagtgtttctccaagctcttcctgccctcccttcgcctgcctcaaagcaggactcgaatcttctcctgcctctctgatttggggtcataagaccctccccagagagggtcccaccctactccctgggggaaggaatgcacacgtcttggggcttctcctaaaaacccgagaggactgggttcgggagctttagggcggctgaacataggcaggctcctggagggtggcctccagggagggcacgaaagctccatgcccctccctcaggtctatctcccctgtgcatctcttatcctttgtaacatcctatataacaaacgggcacacgtgtttccctgagttctgtgagcttcggttggtcagaggttctggaggcctggacttgtgactgatgtctgggggtggggcagtcttggggacagagcaatcaccctgtggaatatgacactctctccaggtagacggtgtcagaatggattttggacaccctgctggtgcctgctgcataattcatcactcgcttgctggtggggaaaacgccccacaagtttgctcacttctgtgttgatgattgctgctgcagtggtttgagggcagaggaaaaacatagtttgagagtttttcaaaaacaggcattttcactatatttaggacagaggctgctgagagcaggtgggattgtcttggagccctgctcctctgtgccctcaagatccaaagtcaaaaggctactcaggccaggggcagtggctcacgtctgtaatcccagcactttgggaggccgaggcggaaggatcatctgaggtcaggagtttgagactagcctggccaacatggtgaaaccccatctctactaagaaaaaaaaaaaaaattagccaggcctggtggcacatgcctgtaatcccagctactcaggaggctgaggcatgagaatggcttgaacccaggaggcagaggtggcagtaagcccagatcacgccattgcacttcagcctgggtaacaaggcgagacttcatatcaaaaaaaaaaaggctactcagccagctcctatgaccactgaccctctgtactatggccagactccacagatgaaccaggcatcttgggtggtgttttaggatatgacctacaggaggagccagggccagggagactgaaagccagtggggccagacagtgtcaatagcaccagagcactctaacacctggcaagcttcaccctgagccagggcccccaccagccagcgggagaatctgtcatcgtgacaagccaacctgccttccgcctgtgctgcttcactggcctgatggttagggaaggaaatttgatctctccttcctgcccagttcctcttaactgcaggcccagggcggggtgacagcagcagttggcatcttccaggcaggaccctgtgcacactgactgcgaggccagagggaagggccaagcttgggagcctgccgagggaggcagttaataggtgagcatctctcagcctggagagccacgatcctcctggaaccctgcagccaacggcagctccccagcatcaggaagtaggaagaactctcccggctgtggaatctgtacctggcatttaaagtttcctctcccaagtaatctttgagacacttgcttattgttaaaggaaaaacctggaccgtgtaggagaacatccccccacactgggaaggagctgagaccaaagaatgactgggacacacccagtatatgagtttattaggactccatgcatggcccccctgggtggtggcaggacagctctggagatccgccctgcctcccatctctaagctgcttttgagctagttttctggctctgtgtgcaaagagactgtttctcttggtctgttcccagatacactctgggatgtttgggttctcagggacacctgcttctcagctgggctctatggccttgattcataacccggtcttcagggttcaagcagcagacatgcaaccttagataacctggtgggggacctgtcaccctacacgtatgatcccacacttggactgaaagggagggtaaatagaatacttcctaggcaagcttgggtgtggagatttaactctaaggaaatttgcaataggaaaaatcactgaaaaggcactggtgaaataatggataaagcacacttgttgcttatagcatccagtccctctttgttcaggaaataggactcggggagtggagaatgtggttctggaattcgaagagagttctgggcactgtgctctccctgtcacttaacctaccttcaactacagaggtccccagttgcccattccttcatgaatcacagttcccaggccacagggattggctcatggtcgagcctgtgacccaggcttatctgacaggaggacacctgggactttcttcctgggaatggtgggacgtagctcgtcttcccatgagccaggctgccatgggctattgagattgctaaaataactattgcagctataaggtgaactggtctgaaggcacagttaacacccaaaggagagagtctctgagaaatagagctggaatcctgaggacattttgaatctctggattgaactgtacctgaagccagtccatatttagaatttttgtttccatccatttgagttttttaggccagtttagattgggttccctgtcacttgcaactgaaataactgaacatctagaggttggctataaagcactttccccagcaatcatttctgggtggccaaaatcatgatgttgttttacaacttcctttccctggcctgaattcttgaatttctctctaataagcttggattatattttagagaagataataatgttatttttaccttgatatgatattacttgtcttctgtactcaggtgcccttcaaacccaggggaaggctccacctggatgtcctaggagctctgatccacatggaacttgcctgccagggctccttgctctggaactttacagccttaccaactaacacttgtgtattaattacacctttttattttttgtcttggaacttggcagatcctagagagcctactcctcctagggctagccaatggctggagatagtaaatgagcatccctttcatatgaaaaccaccaaatgcagaacccacatcccccaggccccctttatcaggcttgcaagggcccatatactttgggccactattccctttccctgatcatcccagggccaggcgcctgtagcccaggggcctctgaaagtactagaacgagccaatcctgagccccaagtctgcttaccccgccctgccttgccttttccatgggaaccacagtaaaggctctggtctctgtttctcccttgctctccctgcctcctgaccgactttggtgcctccccaggaggccctgcatggcatgcctcccactttgggaactgcgagtgaaaccgcctttacaaaatctgacagtaagaggctccatcttgcttctaccctccaaactatccttggtcattcctgggcataggccaagttaattttgggaggaattatactttctagtttaaagcaagaatgataatagctcttccccaaactaaaccacctttctaaaactaatgaaaatccacaagattaggatgatgagagggacctgaattctgctaagatataggcattgctaaatgataaccagccattgctccagaagtcacaagatttgtaacttccccaattactcctgcaggtaacatcactattgtagaacctgtgcctggcctttggagatgtcttttcagactgtaaaaagtgaagtagaggttcctcttcaaagagactctcctccccatctgatgaagaacaagtagtaacttctcttagaagcgaaatttatacaagacctgtgctaacattcttaaatatctgccagccataataaagaaatcaatatactttgtgctcttagctcccacaatttagcctaaatatttgccctggcatgcttatactgctccaagcaagcattatgtcatggcctgttcctcttccttatttggaggtatttttacctttctcagcattccacaagttacttcctccttcctttgttctcctctgcctttgcctcttttgaaaagttctaagttgctagccaattgggacaaatacaaaatgtgaggtcccattccaagcaatggaaaccagacacagcagtaaggtggacatgttaggttataaatgaccctgtctcctttgtttggtgtattctcatggcaaaactgctggggagtgtaccctttctgcagaaagtaaaactggccttgctgagataatgaaatttgtgttcaagtgctatttctttgtggcaccggagaacaatcatttgatttttacatataacaaggcttttgcatttctgagatcagatgactccacccggacctggacctgtggctcacgactcagcagatcctgtggccccacccagaggcaaatgcagcacatgcggaccattttccatactcctatgatttcattcttaaccaatcaacagtccccattcctggcccctgcccaccgaactgtccttgaaaaaccttaacccccaagagccttggggagaatgatttgaatgataactccatcttctgcttggctggccttgtatcaggtaaactttttctttactgcgatgttgtggtctcagtgagttgattgatctgtgcagcaggcaggaagaactggtcagggaattacaggagtaacgaattaccattttaatggcaatcctcttctgatccattgacttcaccttatttaaataataataataaaactcacattttaaaacaacgttcatctattaggtgccacacaccccacagggtgctcagacagaccctgtaaagccaccagattttcctttcagaagcccttctcttgcaccaggaagagagctgttcccctttctctttcttttgcctgttaagcctctgctcctaaactcactcctcatgtgtgtctgtgtccttaatctccttggcgtgagacgatgaaccctgggtatttaccccagacaacgacaccacttaaatgtatttttgtaactggtacaacgttgagcaaacagtaggcacttaaccaaggcacactggttatttgataaagcagactaatcaggccacacaaaagccacagtcactatataatatattgctggaggggcctctgatagcttctagatcaggatttatacagtgcctcttccattagatgttatgagggtctatcttaggctgggttcccctagaagcaaacctgaaacaagggtttgcatgccacgtggctgatttgggaggcaattccagaaagcacagaaaggaagtgggaaagtgaaatagagaagagaagacagcccacaccaggaatgttggtgaacaactggggcttagtcccctggggacctctgaagggcagtgtagggcagtgatcctcatacattggcacatgaaggaatcccctgaggggttgttagagtctgtgccccaccccagagtccccgattcagtggtcccaggtgacatggctactgctgggcccaagaccacacttggagaaccacaggctcacactgtacatgacagttgcctctacccatccccaaggaagaagaagtttttttaacttttatttaaggttgagggttacatgtgcccctcaggtacatgtttgtcatataggtttgttacatatgtaaacttgtgtcatggggggttgttgtatgatgtatttcatcacccaggtattaccctagtaccccgatcctctccctcttcccaccctccatccttcattaggccccagtgtgtgtcattctgctctatgtgcccatgtgttctcatcatttagctatcacttataaattagaacatgtggtatttggatttctgttcctggattagtttgaagcttgggtatctaccatccaagtaactttcattgctggtggagggcagccctcaggggcagtggctctctagcactggtggcctgtatctgtatggggggagagaaagtccttgtgcagagaagctggcacttgcagtaaggcaccatgagctcgcctggggagagtcagcatggagccatgtgggaaccccagcagtgtctgttacagcaccctgcctgtgatggttaatcttatgtcaacttgactcggctacaggattcccagttagctaggaaaacattatttctggctgtgtctataagggtgttcccagaaaaggtcagcatttaaatcaagcaactgagtaaagactgtcttcacccacgtaagcaagtattacccaacccattcagcaccagaaggggattaaaaaaaaatgaagaggggggatttgctttctcttcttaagatgggatatccacctgctcctgctcttggacactggagctcctgagtctcgggcctttgattagaacttgtattagtttgttctcacactgctgtaaagaactacctgagactgggtaatttataaagaaaagaggtttaactgactcacagttccatggatatacaggaaacacggcttggaggccacaggaaacttatatcatggtggaaggcaaaggggaagcaagctcatcttaccatggcagagcaagagagagtgcaaaggatgctacacaccttcagacaaccagatcccatgagaactcactccccatcacaagaacagcaaggcaaggggggaatatgctcccatgatccaatcacctctcaccaggtccctcctccaacatggagaattacaattcaacatgagatctgggtgggacacagagccaaaccatatcagaactacaccctagttttcctgggcctccagcttgtaggtggcagactgtgagggctccctaggctccacagtcatgtgaaccagtcccccatgttaaatatctctctcacggccaggcatggtggttcatgctcgtaatccactttgggaggccgaggcaggcagatcacttgaggttaggagttcgagaccagctcggccaacatggtgaaaccccgcctatactaaaaatacacacacacaaaaaaaattagctgagcatggtggtgcacgcctgtagttccagctacttgggaggctgaggcaggagaatcacttgaacccaggaggcggagcttgcagtgagtcgagattgtaccactgcactctagcctggtgatagagtgagactccatctcaaaacaaaacaaaacaaaacaaaaacttcctctctctctctctctcactaggtatatagatagatagatagatagatagatagatagatagatagatggatggatatggatagataatagatagagagatagatacatgctgttcattctgtttttctacagaactctaatactctaccctaaaacaaaacttctgtagtccaagaagcccccattctaatcagaacacacaaaagccacagtcactaaataatataatatgtaatatccctttctggaaagtcacagtattcactcacatagtaagtgttctcagaagttctgaaatgaggagataccttgaactcaatatttcccacatttatttgaccctcttttgggagaaggcagtttggaaattgttgttctagattggggtttggcagatgagtcctgtaggctgaatgtgacctgcagcctctctgtgtgtgtaaactgtggttggaatgcagccatgcccatttgttcctatgctacctatagctgctttcagctgcaacaacagagctgaacacttgtaatagagaatgtgtggccacaaagcccagaacatttacaatctggcccttggcagaatagttctagactaacagacagtgagactgtgacccaaagagggaaggcattttccccaaggtcactgaggagatagtggtaaagttgggacaagagtgcctggttcctgatcctccccttttcctgaagacccttccaccactctcagctctgcctcacagttcctctcctttatctcttggtctctatccttggctcaccaaggtgagtgatgatcattctccagaaagcaatccccgtgcttctgtctaaaggctcccctggaggccactggaccactcacccatcaggtttgtgtgaggagccaggcctgttttaggaaaggggatgattcaggaagcaagacctggatggcatgcttctgttctgggtgcaggctagtggagaatgggagaccaagactctctgtaaaacaaaaaagaatatcgtttgtgctgaatgttttggagacaactgtagcaggacgagccacagacaacacccctcagacactgggttaaagaaggaagtggctttattcagccaggagcattggtagacttgctctcaagaaccgagctccattaagaaagagttcctggcccttttaagggcttacaactctaaggcgtccacgtgacagggtcgtgatagattgagcaagcaggtggtacatgactaggtgggggtggttagcaaggcaagtatttctccacaccattgtctgtgatctatagatagcacaagctctagggtgggggttaatgtttaacctacagtcctggccagtggcaccgatcagtctgttatttttcagtttttacttcctccttttctttggagacaggagacagtaagagaaatggcctctctcctcacaatgacacaagtaagccagaggccggggagtctgttgaggatggctgggaattgatggccatgggagccctttgcaaggagggacacgaagctaagatgcaaatcacagagctaagacactgtgtgaaagccgaaggacaagcatccaggcaggaggaagagcaagttaaatgggtggagagggagcaccctagcaggagaggagggagggagcattgagtcagggagggttgtggcctgaccatcgaaagccttgcggggcatgttcagaaatttggactttctcctcaggaagatggggagctggtgagtgcaagagcaattcccaggaaacagactaaaattctaacacatgtgcaggcttctccatggacaccgatggtcccagaggcctagatcatgcaagaaaaggcacatgcctgcctggggatgctccaagggacgggttaaacattcacacatctacaccttagatgaggcagcatgtgccgtccttaggatgccctacatcccagcgtgcccgggtcagtccccactcgcatatgttgccctgatattgattactcataacaccccctttcactcttaatcgtttcttggtgtgaatgataaattatatggctacctaattataccatttgcgtccacctaatttaagcctcagctcatgaggcccattactattgggtcgatggtttattctaccttgaaatataaattccttgcaattaataaaaactgtcacatgtttatgtcttatttctcctgctgcactgtgtattcccaagggcaagacacgtgtgtttatcagttcattttgataaagagcatgtattagtccattttgtgttgtgttgctatgaaggaacacctgaaactgggtaacgtacaaagaaaagaggtttgtttggcccatggttctgcaggctgtataaacatggtgccagcatctgcttggcttctggggaggcctcaggaagcttttactcatagcagaaggcaaaggaggatcaggagtgccacgtggtgaggagggagcaagagagcgaggaggaggaggtgccaggctcctttcaacaaccagcgctcccatgaactcattaccactgggagcacaccccgccatccatgagggacctgcccccatgacccagacacctcccaccaagctccatcaccaacactgaggatcacatttcaacatgagatttggagggacaaacatctaaatcatatctgagctttcccacatctaacatgaaagtaatacgcaggcttaggcacattactgctcataaatgaggtcattttgtcttcacaacaaaattattggagtatggagagtcatttcccatttatgaactggagaggtaaagtgagtcgccaaggtctcacagccattagctgtcagaatcagaacttaaacctgggtgtgacaggctccatccctaggcatctttctaagccaccaccctgccactgaaggcctggctgacctctctcccagggcagctcctgactgcctaataagacagaggagaatgcacaataacctttcctgtctgagttttgcaaatataaagcgccctgtaactgctgaataacagccgtcagccttggcgggtgatcaggacatagtgaggactgttgacggtgttgagatttttatgactatttcctaatgggtgtcaggtcagatgtaattccctgtaatgtcagagcttatcagtctcgctcgaggcagtcagacatggcccacacagccagggtgttcttggcgcacgttcaaaccatctgagtctcttctcagagggttttctgaacactagcccccagggaggtacacacggaagatgcaggtatccctgggactagttggttgagggagccacagctggggccttcactagcagccttcacctgtagcctcagggagacttgtaaggtactttgtgctctctcgggggcagagccatggtgccaggggaaccccagggactggagagtcctcatgttctttccctccctcctgaggcaggctcagagctgtggctgccaagaccattctcaccctagctcagcctacagccaccggagagaactgggtttcaatactgccaagtgccacttctcagtccctctaggcctcaaactctacccctgtaagcctcggtgacaggggccacctcacagggctgctgtgtagttgaaatgcctgggggcttgcacacagtaggtgctcagactaggggagccatcagcatcctcatcatcacatcctcgccctcttcaggggctggagctctgaaagagcagaaggtgggcatggaggaggtgacctccccccataagctgccttctatgtctctgtcctgggacaccccaaggggcaggggaaccccgagctgagagggtgacacacagaaggctaagttgtctcctgcaaaatgcttccccgggcccagctcttcccctggttttctgcaccctgcaatgagtccacaattaggttaatgagtaaattggattcggaagcctggaaaaatgatatcctggaccaccctgctctaagcaagagctgtttatcaatgccagtggggtacacacatcctccattcaattctctgttcataagttttcattttattttttactttcaattacggaaattttcaaacactccccaaagtagagaaaataatataatgaatcctcatttttaacaattacgtgtttctgtcattcttctctcagctgccccatacacatacatttttaaggcaaattcccaacatcgtgtcatttcactcctaaatacatccttgtggtgccccagccatctttggtgcatggtcggggaggcggggagaggggtgggggaggtggggagaggggtgagggaggcggggagaggggtgggggaattccacttcaaagacatgggtgaccggtcctggaatggaaccagagtccagggcctccagaactgctctttacaaacatcccataatgcacctggagtgcagggagttaggagtagatgtgggaggaatctaccttggaatcttatcttggaatctaacgccagcatggaggacatcacccagccctggaaatatccgggtgtctggagatgcatccacgccaggacccatgagcaagggagagaatgcgaccaactcctgggactctagggcagcagtcttggggaagtgtggcatcctcactgtgagagagagagagctggaggcagccaccagctccccctccctgccctcctctgccaaaggaaggccctgctatttcaacacaagcggcttgcaggaggagcctgttaagaggacggctggtccactgaaaaagcggcagcagcttcagaaaggttaaaatgtgactcccctgcccctgacaaaaaaactgttttcaattcagaaaacaaggtgtctatggccatattaccatggacgtgcctggtgtcatctgatctcagaagctaaacaggctctggattgatcaatacttggatggaagaaaacaaagtgtgcccattttacagataagaaagacaagcctcagagaaataaaaaatttatcagccaccgggtgacagaggcggctctaatccagtgattccttccctccttcctcatcttgtcttcctggttcaaggttagctcccagagctcattcccgggaggaaacagttctgggtgactgattcactgatcagcttggtttgggtttcataaaacgctgtgctggaacactgagtcggtacttctcccaagtttccagttcggagacacgaggagaatgctaaaagctcgaatatgcaaatgaacatttggacagatttcctctagagtttcggcctccaggcaaatgatttattccctgcagaaatgcatttttgtttctgcttaacgggtgaaaaaggagaaaagatttttcgggacaaccaagcttaggaataaaagtctccatgggaaatgtacttttctgaaagcaaatgttggctaaacaaggacagtgttgactaaacacgtgttcccctcacccaaaggaatggagtcagagaatcccccaagctccaaattgtgggggcagatggatcttttagaagttcacggttcgcctttctcctgcccagccccatgccttaagcaaagtgtgggatggtctcgggaggacacccacaaatgtaagtaggaaggtgggaagcagcctctcctctaatatagaaaaacaactgtgacagacagaacaaagcatgtggttcagacacgagaccctgagctagccctggggagggagacagcagctttgcagccgttatcctcaggaagccctgagcgctgagaggcactgttacagaaccgaactggggtccactcgctaggtgagtaaaacccgacagccacaccgagttttcacagcaataaaaaggaaagtgtttatttgcagggcaccaagcaaggaggatctggaagctactgctcagctcctgacctcccacatggcttgagggtgaaggtgtttaaaggtaggggtaggctgggtgcagtggctcacatctgtaatcccagcaatttgggaggctgaggcaggcagatcactggaggttgggagttcaagccagcctggccaacatggtgaaaccttgtctctactaaaaatacaaaaattagccaggtgtggtggcacacgcctgtagtcccagctacttgggaggctgaagtgggagaattgcttgaatctgggaggcaaaggttgcagtgagccgaggtcacaccactgccctgcagcctgagagacagagcaagactgaaaataaataaataaataaataaataaataaataaataaatatatatatatatatatatatatataggggtaaacttcagaagagcagaagccacaggcaaaatcagaaatcaatatatggagggtacacactgattttggcctaaaagggtgggggcatctttaaaggggaggagcttacaggtcataggtagattcaaagattttctgatttgcaattagttaaggaagagaagctttgtttaaaaattgggggtcagcagaaaaacatgttaactggctaggggacagggtgactcccaccaagcctctcaggaataaacttaaaacaaagaacagtgtggtcagagttctgcctgcaattcccccttatccgaggtctacctgtcagcgaatcccaccggggtctgcagtggggtctgggtgtgtgaaagaactcagggacatatgttgagatgttatctttcatttctgtagagaaaccaaaaatctctggacttatttccttggctttaggtgacgattgctttcttgcttacttacttttcaggcctacctaggtgcctggaatttcccttcgaggaacgcaggagttttctttattttcatgcttgggaaggctcattaggcccctaagagagggtcccttccccatctcaggactaaaatgcaatgaagatgttgctcaggtatgctcggggaagacaggctgggagggctggggccacctttaaggagaattcctaacacactgggcgcccgaacccctgatgggaccttgtggtcttgaatgaaaagatcaggcattagctctgtgtgcccactgacttttactaaacaggctgctgcccagcctagttcaacgtgaccccatccccaccccctttctctgtgctcccccatcacccagcccacatggtgggaccttcactctcatgaccagctcaggccatgctgtgcactcctgatgaagcctcttgagctccttcttcagagctgctgataatctggcattgaatggccaggctggaggttgaatgctgaatccttttgaatgctgtggtaaagcctggcatgtctcagcactgtctccttttgtgttcaatcatcctgacactgcagaggcagctggagagggatgggtctgtggaggatgccccgcagagtgaagtcgagatgatgcagccaccagggccggagggtgagtttcctagtccttgtgtgtaactgggtcactatttttagttggaacctccagtcaaaaatgtcaaacagggaaaatgaatgtgggcttggctgagaagaagccagaggtgaaggttttgttccatctcacttagcagctcactctgggacttggaaaaggccttttctcagttctgggcccaggctttcccacttgaacagctgacattctgtggatcagagaccaccactaccgcagggaaaagggacttagccgtaggaagccagcagcctgctggaaagttcttgcagatgtctgtaatgctgaggtttgcactcagctctcccgctcttgcctgcgaaagtcagaaaatgtggccaggtgcagtggcttacatctgtaatcccagcattttgggaagccaagatgggagaatcacttgagcccagcagttcaagaccagcctgagcaacatagcaagaccccatctctagtgcctgtgggcctagctactcgggaggctgaggcaggaggatcgcttgagcccaggagttcagagattgcagtgagtcacgatgacactactgcactccagcctgggcaacagaatgaaattctgtctctaaaatataaaatgaataaaaaatttaaaaattcaagaagcagaaaagggaaatgtttagcagggtcacaggtgccacagatttcagcatgctgcggaggagccccacctgccaccgccccatcagccaggcccgccggcccatccccgcagcctcaggacccccaaatctagagatccccaggccatggaagatgcatgggactcaggactggaagagagatcagcaaggcaacttcctcatctcctggctaactgatggagctattgatggaaaaatcaaactccgtaaggtatttttcagaggtttattctgagccagtatgagtgaccatggccccggaaatgcagtcttaagaggccctgagagagtgcgtccgggacagttggattacggcttagttttgtacatttcaggcaggcaggagttgcgagtgaagacatgaattaatacatggaaggtgtattttggatcagccccaaaaggtggaatatcttgaagcagggacttatagatcatcagtggacctagagattctttaatttgcaactgattaaaggagtagagctttgtctaaaaatttggagttagcagaaaagaatgttttaagttaaggaagtttgttaaccaaactactgggtcagagtgacctgtaggggtgcatgacttaccccttgtctggcacggccttaggtcctgtttataattggtatcctattgtcgcaaagggtctgctctgtcagtcttctgatctctattttagcatgaatgccaagcagtggttttgtctaaactccaaaagggagggagtgtaacgaggcgtgtctggcctcccttcctgtcatggtcagacactcattttctaagatttttctggggtcccctaggccaagaagaggtactcagctggtaggggcttaggattttattttcagtttacagagagttattgatagaaatgcctccatgactctgatggcttgaacgagaattctctctctttcagtctctttctcaacactcaaggtagaattctcataaaatacatatgatgctgccaggcgtggtggctcacgcctgtaatcccagcactttgggaggccaaggagggtggatcacctgaggtcgggagttcgagactagccagaccaacatggagaaaccctgtctttactaaaaatacaaaaattagccgggcatggtgctgcatgcctgtaatcccagctacttgggaggctgaggcaggcgaatcgcttgaacccaggaggcagaggttgtggcgagccgagattgggccgttacactccagcctgggcaacaagagtgaaactctatcaaaaacaaacaaacaaacaaacaaacaaacaaaaaatgaaaaacaccatatgatgcaatacctagatatgttctgaacttcatacttattaattctcatgtataacatatgctccaggcggtagcaagaatgtcagctcaggacagcctggtcctcactcatctgcaatgaaagactctcattcgtggtgctgggggaaggatttaactgtagaatgttgaatgatcatgtgaataaattacatagagacccagaatacgttatatgatgatcagccaacttaatcaaggatgttctgtccatgagtaaagtatttggaatttgtagtattaagaagggagggaagtccatgagatgtggctgcagtgaagtgctatatcatgtccctggttctgcttgtaactgtgaaagctgctgcttttttttttttttttaacttgcctccacagagaaagtgaaagctcacttgagcatgaacatagctcacagtagcctctaactcctgggctcaagtaatccttccacctcagcctccacagcagctagaactataggtttgtgccaccatacccagctaattattttattttattttttgttgagatggggccttgccatgttgcccaggctggtctggaacttctggcctcaagctatcctcctcccgccctggccactcaccgtgctgagattatgggcatgagccacagtacctactcaaaagcttcttaaatcagatctgggctggaactggactccaaaatgtgggaactaacacatgttttatcaggctgccagctgaggggactttgctgaatttgtggtctcaagaccctgggagtgacagctctcctcccttcccgccccccacacaccagacacacacacacacgcacacagacacacacacacacacacacacacacacacacacacagagtcaccagtcaggtatgcagagatgagaaatgagctgaagatcccacctgctgaggtcctgagactcctggccacacagaacaatagctcctattccctgagcacctactatgtgccacacacagctctaggtggctttgtaaaatggcccgttggtcaaatttacataacagggatgtagcaccttcccgcagctcattttctagagaggatgcccctcttccagcctgaggagccgctgtcaatgccagggagctctcctctagttgtaaccaagtggacgctcattcagcctgggccacttacattctctttctgggggatggggaactgggctcagaaatacatagaggccattgagaggcaggccccagccacccaagcctgggctggtacttgcagatgggagctccaggtttcctacctacagagagaggaaaatgaaccagcaaatgtacagagaggataaggaatagaggagggtgcgggatggagctgttgatcaccaaagctccagacagattccagccctcagctcccagccttcctgagaacccaccttcccgtagctgcactgactccatggatgttctattgtactgggtgctgctgggggccaggccttgtggccttgttccagggcccagtgtgcagtactccctgtccagggcacttccactctaatgggctctgtgaggcacgtccattcttttaaataaatctttgtttactggagtgagcccaagtagatttctatttcctgcacccaagagatgtgtcatgaggaccaggttggtatggattttctcagtctacagaagatgactgggaggctccgaagaggcgagaagtggcccaaggtcacccagacgcagagctggacattttatttttatttttatttgtttttttatgaacaaggtctcactctgtcgcccaggctggagtgcagtggtgtgatcatggctcaatgcagcctctacctcctgggttcaagcgatcctcccacctcagtctcccttgcagctgggatcacaggtgtgcgccactgtactcagctaattaaaaaaaaaaaattatagaaacagggtctcactttgttgcccaggctggagtgcagtggttcgatggtggctcactacagcctcaatctcctgagctcaagccatcctcctgcctcagcctcctgaaaagctgagaatacgggcactcaccaacatgcccaatttgttttaatttttctacaggcaaggtctctctatgttgcccaggctgatcttcaactcctaggcttaagcgattctcccaccttggcctcccagagtgctgggattacaggtgtgagccctggcacctggctttgagctggattttgaaagcagcacatcatcttgaagcacactcacttcccacagggctgtcattgcctcgcaggggctaaaagagttcattctgccaaaagagttcggggccctgcacccagggtaacccctggggtcaatagcagaaaccccaaagggtgctgggaaagctctgctcatagcaacacaccctccagggtgttttgaatgctatatgatgttgattcccaccacagccctgctggagccacagcacaggtgttacttcgcttttacagttggagaaaccctgagcttggagcagccaaggggcctggtgcaggaggggcaggactccacccaagactcctgacctctgctcttttcaccgcccagcaatactttaaatctgcacctaccttttacatcatctcctctgatcccttccctccttgggctgtttgctatttcttcttggcccagtctcctctacaaatttgccacccaacttctcaaatatttttcaccccttcccagtgaagcccccatctcccctaaagtcagcctccccttgtcttcctcacacactctcttgaaacacaccacaaaccaaccactgtgttctcccctcccctaaaccactctatccaggtgcatggtaccccatcagtatcaccgtctccacctaatggccaggagaaacctgaagtcagcagtggcttcagtctctttctctttctacgtcattcacaacatgtcagcatcactggcgaagtttctgtccaatccaaccacttccattgcttcaatgtatctctgtcctgtctcaactggatggctgcagtggcctccggagaggtctttctgcttcctccattgtggctgagtctattctgtaaacagcagccaggggcatccccgtgcatcctttggataaaagccaggctggcaccaggtgcagtggaatccccagggtgatgttctcccaagaccagcacaggagtgtcgggaaagcctcatgctaaaatgctgattcccggccctgagcccatccctgcaagtcagagtggcttaggatggggtgggaattgctgtttaagaaggtcccagctgatttttccgcacgccaaatgttgagggccatggaggattctgacaggcgaggaggaagggctttggaaggaaggagccctcggtccctgcagccactgaacaaagtcagaatctaagctcctgggctggggctgagaagcagctgagggtcaggagcccagcatcgaacatccggccctactactgcctggacgtgcaggctccagctgaaggactctcttcgagaaacccatgttccaagtcacaaaacgagatactgacatctgcctggcagggctgccgtgtggattaatacctttgcagtttacccagtacttagcacaggtgctaaatgcctcacaaatgtgggcattatggtaattagtgatgtgtcttcccgaaaacatcagtgattttctggttgatggatttacataacttgaaggccagtggggcttccctgtggaatgtgcctcggattcccaaggaacattattctctgttaccctctccttacacacacacccctaacacacatatgtacacatgtacctgcacacatacacccgcctaactcacatatgcacctagcacacatagacacatgcacattcacacatatacccacctaacacacacctaacacaaatatatacacatacacacgcccacctaactcacacacacctaacacacatatacacgtgcgccctcacacatacacctgcctaattcacatgcacactattggcacacatatatacacatatacctgcacatacacacccatctaacttacacatacacctagcacacacacatagacactcacacacccctcgatacacacctatccacgagccccatctcagtccctgcgaggctcctgctgcgcccagcaccgtgtgtggtagggaaggacttggcaggggtctggagtgggaggcgctggcccgtggtctggatgcccaaggctggcgctctgcttccctctctttaactcctcagggactaggaaatccttcctttccctttctggggtttcctaagtgctgtgagtggtgctacctacttaggaatcagttgatttcattcttctgacaatagtttgctccaggtcagtttgggactgcaaataaaagattttctttattttttggcagggagggacattccactttttaaatcagctttctgaagcatgatctccatataatcacctagaagcgtacagcacaatgatcttgacagatgccagcatccttggaaccactgccaccaccaacgtctcaaaccattccatcaaacccagaacactcctggtgccctgaagcgtctcccttcagtggcagaaccagcagagattcagtggtcacaaggtgagtgaggcggcctgggtctggctcctggccattaattttaaataatttgcatttaactttgaaccaccacacctggccatattggatagtgcaggaggaataaactcactggcacatccttctggggcgtctactgtgtgcccccctccaagcggagtgtgtgggaacagagagcagcatccctgccacagtgggtggcggtctgcttgagagatattttattttcttgaaacaaataaaaaagacaaaaggatgcatggtgtaaacactggtggtcaggctaaaatcaaaaaaccattagtgggcaacacagcacagagtgggctctgcccaggccacatgtgtgcagtgccagggctcggcttcagacccagatgtccacacccagccctgcctattacacaaaggcggacagagctgtgggccagcggctggcaaaaggccttggggcaaccagaactctccatcagggcattgcagcctttaagagaaggtgggaactgctgcatttgccccgccctggatctcagcccaggaaacccactgtcacagaacaacagtcttaggagctttcttatcgagacagtaggaagcttttaaacacatcagtggtgaacgccaggcgggtctctggaactttttcatcttggaaaactgaaactctctactcattgaacactgtacacttgattgagagcaaattgtatgtgtttttgccagcctcttcctgaaggcggacatttgtcttgatctgtattggaattctttatctatgtttaaattttgtatgagattgaattcatgtgtatgtgaactgaaatgaaattaaaatgtcaaactacaaaaagggggatatttttatttaaaaagacaacagtcatcccataatcataccttgtgcccccctaggctggcatgaggcaatccactatttgtaagcatagacttggggtcaaggtccgcattccacctcttctttaacttctctctaactcagtttcctcatagaaaaataaaagccctgacttcataggaccatggtgatgatttactcagtaaggtactcagcacaacatctgatgcagagtaaaaattaatgcatgtctaatgtttactatattccagccacaatgttaagctcttcatacaaacatcaaccctccaaggtggatgtgattattagtcctactctcaggatgagaaaactaaggcatatgactaaattgcatggtgctaataagtaattgcaccgggattaacactcaggcactctgattccagtgctgtgtttttaaccattagagttaagtgcctgtatttgtttcctaggtctgtgtaacaggaattatttatttatttatttgagtaagggtctcacttttttgcccaggtgggagagcagttgtgttatcccagctcatgacagcctcaaactcctgggctcaaccagtccttctgcctcagcctcccaagtaattgggattacagggatgcgccagcacacctggcttttttttttttccaattatttgtaaaaatgatatcttgcttttttgtgcaggctggtctggaactcctgggtgcaagcgatccttccacctcggcctcccaaagtgctgggattagaggcataagccaccgcgcccagccaggaatggattttctcacagttctcgatggcggaagtctgagatcaaggtcttggcagggctaggtctctctgaggcctttctccccagcttataggtcgccgcctcctctctctgtctttccttgtcttccttgtgtccacagttgtgtccaaattcccctttctcataaggacgtcagtcatgttggattagggccctccctcctgaccttgttttagcttaatctctgcaacttaacccttaacctcagtaaagatcctatttccaaatgtgttcacattctgaggtcctgaggattaggactttgaaaggattaaaacaggctcttctggcatattgacaatttcagctaaagactcttgagaaacagcaggtgcaaaaagatcacagtgacctccatgctgtaccttgagatgaaattccaatgcgaaagatgccctctccaccctagaagggaaagcaacatccttatctttgggagtgaaaagtccaaactgagagcatactgtgagtacctcattagcatcattccattctctgagcttccccgcagacttcagttgcttcttcacagctctgctctttgtcccgtccaatctctgagtaactaactcactgcttctgcaggtcttcatttctgcaggagggctcccatgctacataaatcctgcattacacttttctcctgttagtctatgttatgtccatttaattctcaggcccagccgggaccctaagaggacagaggtggagtttttccacccctacaactttacccaatcacaattcaatcctaacagtgcctttctctggaggggctctgccagcatgaattcctttacgggtggaagcctcacagtccagtctaccagtgaggtccacatgggattggctggagggagctacgaagtcaagcggcgtcaggtacagagaaacaaatcccacatccaagggccaggaggcggtagagcaaaccacgcacagccgggtgacttaagggcaaggaagtcttcctgcaggaggtgaatttggcacaagggatacgtttttaggccctgagtggaggatctgggtttcaaactggacttttgaaaaacacactcttattgtagaagggcctgcgggtttgttttaatcacttctcaaagctacgctaggcattcgcagctcaggatccccagtttagcctaataaaaaaaagtaattacatcatattacagataatttgattgtgtctgagacgataattgagttaaaacgcttattgtaacagacacatcagattggcaaggaggaagctcggcttaaatacaaacagtgttgagagtggaattaaaggattgccattgcagttaatccaatagtaattattttctgaacataaattcctgagtagtgaggacacaattatatctacaaacagtcataagaaaataattactccacgttccacctgaagcaacagtccataaaagctctggtgccgctctccaggaagccgggctctttccatcagaaactcacggccgatgccagtactgagaaaagggctcccaagcactgcgggactcaccaggcagcttatgacaggctttccaagtgtgattgctctgcccgcgtgacacccaggcccaccgtgtatatgaccaccccaacaggccgacacttaagacaccccagaggatgaacacgcacgtctttcgttcacagactgcagtctccagcctcaccccctgggccacccaccctcccccgctggactgacagccttcccgtaccatccagaggccatggcctactttgtcaaccctcccttgtgaagatcctcatcttcctgccatgcctgcccagccagactctagccctgcatcagccagacccactggtagatgtcggggcgatctcacactcggtcctggagctgcccaggaacctcactgtcctcctgtaatctccctcgctctccttggccacttgctcacctggtgagctttcccctctccaaagcgactccacctcctactccagatcctctccatcccaatccacagagggcatgggataaaggagaagccccagacaggaacttcttcaacttctgcctctggccctcaaagacgcctgcaaacagtgtcacctgtaaagctcttctgcttgggttttgtcctaaggagatgcctgttctcctcctcactcaggctggctcctcacagtctccaatcctgtcccatcctgactcctttgcaagcctcctatgtgggcttcggtgccccccacctcgaaagcttattccctcaactccacgggcacctcagtcaaacttccggaagatctccctccttgctcagggcagcctctttgcaccctagcctctgtctcagcatctgctagcatcgctctcgcagcaggagccgccctgctctgctcaccaagatgctgccagtgtagctgggccggagctctgcaccgcgctggagtcccgctctccccagagccccggccctgctgtgtgctgctcctccgtttctctgcaactccctcctgggcctctgaggttctttcttgtggctgctccataaaacttggtgatggccagtgttccacttctaccccagcctctttgctgccaccttatggtattctccctggtgatcaaatcctccctgaggtttaaaatacactgatgcccccagttctgtatctccaggctgaatctgcatcctgagctcagcttgtctgaatgctgtgcccactgtgttctctcctgcgggcttgctctctagctttctctctctctccctctctctctcaccctctccctctctctctttccttctctctctctccctctctctcttctctctctcctcctctccctctctctcttctctctctttctttctctcccctccttctctctctctctccctctctgtctctcccctctccctctctccctctctccctctcctcctctctttttctgcctcctctttatctctctctccctctcctcctctctctctgtctctccctctttctctccctctctctctccttttctctcttcccccctccctctctctccctctcttccactctctctccttctctctccccctctccctccctctctctcccccctctctccctctctctctccttctctctcttcttctttctctcctcctctccctctctctctgttctctctctttctttctctcccctccttctccctctctctccctctctgtctctcccctctccctctctccctctctctcctcctctctttttctgcctcctcctctttatctccctctctctctcctcctctctctctgtctctccctctttctctccctttctctctctccctctccttctctcttcctctctcttgctgtctctctccctctctctttcactttctatctccctccctctctttcctcctctcttctgtctctccctctttctctccctctctctctctctccctttctctcttccccctctctccttctctttccctctctctctccctctctgtctccttttctttcttcccccctccctctctccccctctccctctttctccctctcttcccttctctctccttctctctctttccttctctctccctctgtttctcctctcctcctccctgtccttctctctcctctctctctcctcttcctctctctctcctcttctctttttctctcccactttctctctctcttcctctttctctctccttctctctctctttccatctctcttcctttctctctctctccctctctctcctcctttctctctctcccctatctctccctttttctctctctctccctctctttccctttctctccctctgtctctcctctccccctctccctctctctctcccctgctcttcttctctctcctcgctctcctcctctttctctctctccccatctctttccctctttctcgcctctccttctctctttctgtccctctctttctccctttctcctcctcttcctctctctccctctcttttcctctctgtctctccttctctctctccctttctttccctctctctctctctctccttctctcactctctctctctctccccccacccccaccaattttcttctgacattttctaatctgaggttgcgttactccatgtgcctggagaagacgatggcaacataggattctgcatgtaaggattttcctaagggaaacagggttggaagaaaatggagggaaagtgggaaaagcctggagaatcatcaaaaggaggtgcaaacctgaccctaaatgaagggaagtgggagggaagcttgggtgggagccacctagaccatggtacagtctagggaacgtccaccaaggctgtaagggaagcctccagccaaaatcaaccagcagagtggtgccttctcccagtctgccagggcttgcctgtcttgggagccctgcctggctcagacatgggctgggagcagctcctgggaagctttggtgtaaacgctgctcagagcacagaagcttggtccagatccctgacgttggagatctgtcaggcgcattcccaggtcacggtagcgaaccagccccactgacacgggatgcttcctgcagggctccctggacacacattcacccccagtgctgaatccaacggattctttctgtactcactgaccatcctccttctccatggagggggttaggctccaggccctaggagagccaggctaagggaagagatgggaaaacatgaaattgtttgaggtagggggacatggagagggtagatgctcattggctgaagctgaggggcaggttaatgcaggaggggcaaggaatggcccccagccgctgtggcctgagggaggctgcttgctaccttgatgcaacttttaatcattatctcattttagagattagtgtatctcacactttgtcatgctgcaagaatgccgtaagctgcagaacttggcaaccagagatttctgggctctatttccagagaagttgcttttctaacaaattcccagtcatgctgatatcgccagcccagagaccacactacccaaataattttggtgagagccactttggactgccatccctagaggtggcttcttcttttctgaggaggacacccagggcccagggacatacgtgtttgccttagggagctcctggccagagccaggccatcctctcatcccaggcagctcagctccgtttgcagtgcctccatctgggggaagaaaagggaagaggtgtcaagcccagtcaaaggcaggagagaccaatgtccatgccggtctcatccctggggcctgttgtggtcacatttagtcctgccgcctactgggggctgctgaagtttgccaagggaagacattctcttgtcattggggtgacactgcaaactctgcctcctgggttcaagcgattctcctgcctcagtctcctgagtagctaggattacaggcatgcgccatcacgtccggctaatttttgtatttttagtagagacaaggtttcatcatcttggccaatctggtcccaaactcctaacctcaggtgatccacctgtctccgcctcccaaagtgctgtgattataggcgtgagccatcatgcctggctgcaaagggcattttgaagctcttgtccctgatcaatccctccatgctgcagatgagggcacaatcaagggcagagaggggagagggaggagcagctcttagtagaaacggttttcttagtgcatcctgtgcaccggtggatatgcacatgagcattttctcttcccgttttgctccaaagcgtgtgagatgtttgtgctatggcaaatacaacacctgtaggagtgtgttatgggttgaactgtgcgcccccagaaagacatgctgaagtcccaactctcaggatctcagctgtgacctcatttggagacagggtgattgagatgtgatgagttgagatgcagtcatcctggagcaaggtggcccccagtccatgctcactggcatctttacaaggagacagccttgggaaggcacagggtggcagggagcatgccatgtgaagacgcaagtggagaggggagtgatgtggccgccagccggggttggactgcctggattgtcaggagctgggagaggccaggaagcacccccctcctgaggctgcagagagtgcatggccaggctgacagcttgaatggtttggacttctggcctccagaactgtgagaggatacatttctgtctattacagaagctctagaaaagtcataacagaaagtgtctgaggaaaggtgcctgggggttcctggaagtgcctggggattcctgagggtgcatgggggtttctgggagtgcctgcggtttcctgggggtgaatggagttcctgggggtgcctggcgcatagcaggcagggacagtgcatgattgttctgctggcagtactgggggctgggctggccaccccaaatgttaccctgggcatctgcttaacagcccaaacagagggaataatagaccctcaaagatggctccgtccctgaggcctagagggctgtgtgagagctgacctcaaggccaaattcttgccccctctctctgttggtccatgagccccaggatcctcttcctggctctacactgaagcctggacttggaagctgccatcctaaggcctgcatttaatcaggagaacctgaggatgtctaagccattagaataaatcacacagatattccttttggggtgtttgcaatcacttcataattaactgacggcttcatagcagccactttcacgtgtgtccaatggtcacataacaacatcgcctactctgtgtctacaccacggcagcgtgggagggctggacgctgagggtgcatcctgccacctctgcagccccggagccctcccccagcaacaggggttcgtgggggcctgggcatcagatgggtgctcagtgcgcctcccctctcacctcatcatgaaacctactgtgggtcctctcgcaacagcagcacccttggtgaccgcctgcggatgggccactgtaccggacattgtgctgacaatgtccacgttgtcctgtggattttacagcaaccctgcagaggggagtctgaggcttggaaaggtgacatgacctgtctgaggacaaggagtcagtgagtggtggggctggggctcagcctcagccgttaggctcccgagccctgctcacaaatcagtgtcctggggagggcagcatggatttggggtttaaccacctctgggctgtctttctgcccagcactaaccctcggtgtccccctgtgggctgcagaggggctagggctggggacaaggtgaactgcccactgtctcttagtgagataaatggaaaatgaataaattccctgaggtaagtggtcaggcaggacttgcaaaaagtgaaatgattcaataatttgatttttaaaattaatgaatgaattaggactctttttgagacagggtctcactctgttgcccaggctagagtgcagtgatgtgaacacagctcactgcagcctcaacctcctaggctcaaggatcccctcaccgtcagcctcctgagtagctggtactacaggcacatgccaccatgcccacctaatcttaaatttatttttaatatatttaagatggggtcttgctgtgttgctcaggttggtctcaaacaccttggctcaatccatcctcccacctcagcctcccaaagtgctgggattacaggtgtgagccacctcacccagccaatagtaagattttgctaatgattttagatgctccttcaataggttccctctctagctttccccaactgttgccttccagtgcagctgtgaaagggaaccaagagagcccccctcccatccccgctctccagaactgcccactggtggaactatctcccgcccctcccctctccccatccctctcccattcagggcctcctggaggtcgggtgtgccacacgtctacatgcgctgttcataaccagagggtctgaagtcacacgattcggggtccagccgcaactctgccccttgtcagccaagtgagctcagagaattcacttcttctctctgatctccaccttcccatctagaagatgaagacacaaaacagttttccttcaggtggctcattgacctactctacaaatatttcagagccttttctgccaggccctgttcaaggctctgggtataaatcaacgaacccaacaaaatcccctgctctagcccaagggaggtgagcaccaaacaaagtagagtatagggttagaaggaagacaaagcggagtggaggcgtggggtgcccccgcacagtgaagccttctctcccgcggcaggaacccctgggctgcagctggggaccgcgggaccgtgtgcaagacaggagcactgagcctggagagggagtcccaaggacttcgtttgagtccctgaacacagcgttgcctgaagggacatctgccctcctggtctttggaattcttgaagctaattcactttccccaacccctaccggactttccctttttatctaaatcagagttggttttctgtcatcgtcatttgagagggtcctggctcaggcacgtgcttaaatgcttctagtttgtttttccttctatttagagggtacgatgatttcactgtgcacctgcagtgggggtctgagtctgcaggcaggaggagagggctcgctgctgagtgatgagcgcacctccccgtcctctctctgtctggggagaaccaggcgagggaggtccaagccctcacacccattgggagctcagcccccttttctgagagcacttccgtgtcaccgtgtgcctgtggactcctttattaattgctccttagagcctaaaacccagttcttttatgaaaattatgaaaccatcaagcagcctgacaatgaaaataatgcctctctagtatcaatgttgtaacactccctcccgtgtttctgagcaatgcattcatccctgtgagtgtggagcaggcaggaacctgagtggcgtgaataatggggccctccgcagcctcctacaaccagggacagggctgggagtggaaggcaaagcgttgttccatcaggaatagattattcataatttcatgcccttcggaccagccagggtcattaatctacggagagcctcaagtcctagaatggtggaagccttgaccgcatgcaatgcagtgcatcagagtcctggggtggagaccatcccatccttcccaggccatgctgggggcggcctccaagctcccacctgcaaaccggaatagagcgagaatgttctatggaggtaacaactttggacataaacatctgtcatttgggcttgtgcaggtggagttgagctcctgtatatcctgttcagaaggggaggacttggggtcagaggaagtccgtgctgtgctcctcctaggaccccgcaccttccctgtgctgggccgcgggtgtgcgcagtctgactccatggcacacgctcaagtggggtgtgtgcagtgcaggaatgctgttttgggggcgggggctttgcgccactcctgcagtggggaagggggatgtccaacttcagcgcacagtggggagcagctggggcaccgagagctccttttcaggattcttatttgataggcgagaaaggagggtgggagagtccagccgctcgcatgaggttgcacagctggtaagggtggggctgggagacacaacctgtgcccagggcctcactcttagtcgccacccctgagggccttcctggcacacacactaggtgtccagttctgttctgcatgccggctgtccccagcagggcccaggtgagcacatggtggggagagggctgaggaggaagatgtgatccaaaaggtcagttctaggtgttgggagaagcagtaggtgtggagagggggtgagggagccctgacttcctccccaagcaaggctttcctgcacaggtttttataggggactctgacagtagacgactgtggggtgactgagtgctgccaagctcaggaagctggcggcagggggaggacctggaaatgccttccccggaggagcctccagcgtggagcagcagacaggcagactgtaaataacagaggagggtaatgggaatacagcagggaatacaggtgtgacgcctgcaagagccccaccacatccattctgggagatgcccccccgccactgccagccctgtccagcctggaggggggccggaggaagacagctgaactacgcccctctgattgagcagagggcaaacatcccctgcctttgttctccttaatctaaattgaatctggggagggggacgattgcaaggtggaagtgaaaacccagctgcatttcaaaattacactgatcaaaatggaaatggtctggaggttttgaggagggatggctgatgcaggtacaaaccttacttcacattaattggcacccttttcagggaggaaagggcaggaataacttcataatactataaaccaagactgtggccactgccatctgtgctaagaagccaagggagactttgaggctggaatccttgaccctcattgtctagaccctgaggcctgcagaggtccagaggcatcccctgctgcgtcttctcaagagtgaagatctcctgccctgatctcacagccttctctgtcccctctgacactctttgacccaagtctcaacagtacctgcccggttgtggaggcaaaaggtgtagaagaagggtcagtagcttggaactggctgtagcttggagcccagccctacctccatctgcttcaaggccttccctgagtcattggcccttacagagagcattctcctctctccacacctgcccagtctccagggactgccctgccaacatcctcaggatcactcattttggtcagcacagcaaggtgcgggtcagtgtctccaggattccagaatccatcccaggagctcaccctcacactccttcccttagagcatataggaagatatcccctatatacacacactcttatctctccttgaaattaagcagtattcactcagcctgcaggaaagtagtccaagactttttttcatgttaatctaaattaaatctgcaaatggaaagaaggcctcatgtgagaagaagccaacctcatccagttgctggccgaatgttggagggagagcgagtgcctgggtgagcaaacgcgtcgttgtgaaatgtgcatcctgcgcaggaccatgtgcacatgtgcaggtgtctggggagggagcttgggccatgattcccaacctgcctccagggaggtccctggcattctagatgttctgtgtttaaaaacagcctctccagtggtttcaggagtgaaaaggataaaatctaagagctgtgtgaccccaccctacctaaacctttccgcctaattaatccaggactcagaagcctcaggaccattgctatgcctctgaggcagatttgggctccctgaagcccacatggcccaagatagcttggtctgaaacctcagcatccgcctcactcctctgagctaagccgtcttggctccagagggtctttgacagagtgtgaataacctgggaggtttcatactcatcaacacagcagccttgggccggataagaaagggcttgctgcctggtcctactggagaaaacctggaatttgggccaccagatgggtgcccagggtaggtgggaaaacaaagttctccaagtgcgttaagctgctgatctgatggggctgccaggtaaagtacaggatgctgagttaaatttgaatttcatgttggtgatgaatctttttaagtgtaggtatgtcccatgcaacatttgaggcatacttatactgaaaaagtgtttattatttatcagaaattcaaatgtaactgggcatttttaatttttatttgctagatctgtccatcctagctgctgagggcaatggcatcttgcaaataagatgcagggagcagcgatcctagtgagtttccacccaaggatccagcctttcaggggacagtgcaccccacgccagctgggaatggctgaaacactgggccaaagccaccagttctcaaacgagttgacagatggaatcctgtctttattgatatctgtctagtgaggtcttccctgagactgctgtttgaaggcataggtgtgtcccaaacgtgtctgtgtgccctgcagggccagctcaaccccaggcagtgctaagggccaacaccttggggctgggcgccgtgttgcatgtctgtaatcccagtactttgggaggccgaggttagtggatcctttgaaccaggagttcaagaccagcctgggcaacatagtgagacctcatctctactaaatcaataaacaaataaaggtggtgcgtgcctgagtcccagctactcagaaggctgaagtgggaggtttgcttgagcccaggaggtcaggaggttgaggctgcagtgagccatgatccactactgtagtccagactgggtgacagaacaagatgctgtcaaaaaaaaaaaaaaaacaaaacaccttgggtttagttccacttttactggacacaatctctctaacactatgtgtcctcatctgtaaaatggggtcaatcatctcttctctactggtcccacagttgcttgtcacgaataaatgataagttttaggaaaatagttggtgaactgtaaaatatttcaaatcaaacatcctacagtatttgtgttgctgtcaaaatacgactattacattcccctgagcagagatgtcttacttggttcctccctccttggtgggagcagccccaccttaccaaacgggtttcccagaaggctgttacagaaggtctcggtgcaggatgggcttgcttcggtcacagtggcatggcagccccaccacggacatcagcagccaagcctccaccagatgctttgaccaatgttgcaggcaataggaggcactagggaggcatcagcacaccccagcttggactgtctgtttttaaataaaataaaccctgagccaggcgtggtggctgatgcctgtaatcccagcattttgggaggccgaggcggggcagatcacctgaggtcaggagttcgagaccagcctggctgacatggtgaaaccctgtctttactaaaaatacaaaaattagccgggtctggtggcgcatgcttgtagtcctaactacttggcaggctgagacaggagaatcgcttgaatccgggaggcagaggttgcagtgagccgagatcatgccactgcactccagcctaggtgacagagcatgactcagtctcaaaaaataaataaataaataaataataaataaataaacctgcaagggatgcagcatgtcaggaacggatataattttaagtgcttctaactgaaatatgtagattgatagctgaatcacaaggacatctcaacatacatacgtttattcccacactttcaaccgtgtactcaacacacctttcctcagcccacagtgagtccggtcttccctctgggaagccgaggcaggggtgctccaggctgctccacgggagatcgggggctcctcagacctcccctccccaggcctagcgattcagtgtccagcttcaggtcaggcccggccccactccccacctgtctttctgtctctgtctttctctaggggtcaggcggagctccaccagtgtctccaactcaggtgctggaaaccagtcacagcactgggcttggtgacaccaggccagggacctagcagaccctgtgtagagctgatttcttgctcctctacacagggggtggggctgctgcccttcagcagagcctcggctttcatttaaagccagcagtttgagccctgccacaggacatagtcagagctttgccgcagcctgctgctcccggggaggcttccctgattgctgcagcttacaccacgctccctgcttcctttctgcttctcagtggacacgggtcagctccctcatcctgcctggggcgtcctcagctcctgggcaaggccagcagctgctctccatgcccaccgcaggggtgggaacacagaggtatttaggttgcgactcaattagaatttttagaaatctccccctaagtattttccaagctagtgaagaaacagaaacccataacaaccacgaagcagccgtgtgacagcagcacgctatggtactggagcaaggagatcagccctgtgctcaacaggataaattttttttttttttttttaaagacggagtttcactcttgttgcccaggctggagtataatggtgcgatctcggctcactgcaacctccgtctcctgggttcaagcaattttctagcctcagcctcctgcgtagctgggattacaggcgcctgccacttaatttttatatttttagtagagacagggtttcgccatattggccaggctggtctcgatctcctgacctcaggtgctttgcccacctcagcctcccaaagtgctgggatcacaggcgtgagccacagtgcccggccaacagcatgaatttttaggaccctgcaggaggaaactgtctggggcgcagaaatgggttcatttccacccaggaagctcagctgcccaggaaggtcacagaactgctcgtgcctgctagactgggataggacagagcagggacagaaggtgaagggcagatgccttgtgcatttgggaggagaacggagctgagaagtaggcagtggtggccactttcagccacagcttcaccaggctctaacatcagggggcacaggcctggtgacagccccaggacctcaccacctgggtcaactaccccttggcaatcttctctaggctttgtggtctttgtgtcactctgtctcctctgtggatttttcattatgggcgtaacaattactggattgatgcgtcgcctttgaaagccttgttggaagcgtgtcgctttggagaaatgtgctcaggggaagccttgaacatgcattatccgccccccaggtaggcaggcccctgtcttgagagcacacagggcatcttctcactccttagatctcctgagaggtgcctggcgctggggtgttatcaaccatggtgatgtgatgggagaggcgcaccagggagtgcagggaagagcaggctgacttctggctctacgaagctggagaaccctgctagcatagcacaaagagcgccggactgggtgccaggacagcgggtcccaggcttgactctagctgcgtgtcatttggcattgcttcctctctcagtgtcctcatttgcataattaggagacagaatatttttccaagagttgctcattcattcatttaagaatattgcagaggccggaagtggtggctcacgcctgtaatcccaacactttgggaggccaaggtgggcggatcacctgaggttgggagctggataccagcctgaccaacatggagaaaccctgtctctactaaaaatacaaaattagctgggtgtggtggcacatgcctgtaatcccagctactcgggaggctgaggcaggagaatcgcttgaacctgggaggtggaggttgcggtgagctgagatcgtgccattgcactccagcctgggcaacaagagcaaaactctgtctcaaaaaaaagaaaaaaaagacatgtctgtaattccaacactgtgggaggccgagggggcagatcattcgagaccagtctggccaacatgccaaaaccccgcctctactaaaaatacaacaattagttgagtgtggtggcacgcccttgtaatcccagctactcaggaagctgaggtaggagaattgcttgaacttgggaggcagatcgtaccactgtaatgcatctccaaaaaaaaaaaaaaaaaaaaagaaagaaattgaatattcctgggcgcagtggctcacgcctgtaatcccaacactttgggaggccaagggggaggatcacttgaggccaggagttcgagaccagcctggccaacgtggtgaaacctcgtctctactaaaaatacaaaaattagccaggcatagtggtgcatgcctgtagtcccagctactcaggaggctgaggcaggaggatcattcgaacctggaaggcggaggttgcagtgagctgagatcacaccactgcactccagcctgggggacagagcgagactccatttatgaaaataaagaatatttattgagtgccttttatgtcccaggcactaatctgggcatttgagctacaggagtgaaccaaagaaccctagtgcaggagcaggggagtgctcaaaataaaacttgaagcagggtggtctggagaggccccattggaagactgtctcttagcgactttcttttccttcaacccagcaaggccaggcctgtgggtgaagagttgttcatttacaaatagactaggccaagaaaatcttaccctctttgcaagtgaagatcaataactcatgaattcaaaactaggtttgtgaacaatgatgcttatgttaatttaattttatcagtaggtttaataatgtcttattaattcaatagaaggctttttaaaaaaaataatgaaaagctgcatttgaattagtcttgaaccaagcagggcgctgaccttggtctcccctgacgatccacaaataaggcttttttgtggacgagtcgtgcctgctccctgccatgcatggttctttccatcccgccccacactggtttctggcatctggcttcgcctgtctgatgcaatgcagagaaagagatccagagggaaacgtggaaagtgggagatggggtggaatgtgtggagggagacttactctcaaggaagcagaaagcagcttcttcccagaatctctttacaattggagaggccccatcagctgtggggagggagggctgctcacacctgcctgtgggcagcaggtagaataaattatttctagaggctctttgagcaacactggagtgaaattaggccaccttccacaattctaggatcctgctgtctacccccagagcctgatcaaaacattactccaccaatcccaccaggtcttccagggctgtggggagaaatgtctttgttccggataaccagagctgtgctacggcacctctgcaggatggggtagctcagagttggggaccccagcttcctctctctggcagggttggtctctggttagacgtgctactagggagctaggccacgtggacatcacagacaggtgcaggcatttggaggagaggatcacagcagattccgggaagttggtgcccttggggcctggcctgatctttcctgttaagctgtattgtaggctgagcaccagccaactccttctactgcccaagaagggaaggctggagccttggaagtctgctctagataggcctgctggatgtgagaagaaaccaggcaggatctgaggaaaccactggtgctggctgcggagtccagagctgatctcctgaagattaaaagttatatcagtaaggagaaagttggagagcggccctttgggctccagaatcagctgaattcaggagacaggttttgggaggaaagatcctaagcctagctaactcactgctcagtcaatggtggagaatgactcatcaagagtcaagataatgaaaggtggtggagataaagaggatggtgatggtgatgatggtgggaataaagatgaggacaccattcctttcctctgtattcaattccttgccacatgggcctacccaacatcatgtgttttttcatcaaagccagcaaggcagagaagcaataaagtcagctagcaagatggaaattacagtcttttgtaacctaattatgaaagtgacaccacatcacatgtgccatgttcttgcttttagaagcaagttacgagtggccaggccagcccacattccagaagaggggacaactcaaaggcatgaatacgaggacatagggattattggaagcttctatggtttgaatgtttgtgtccctccaaaattcatgttgaaacgtaatcctcaatgcaacagtattaagagatgggtctgttaggaggtgattaggctatgagggctccactcttagggttgatatcagcgtcctataaaggggcttgagggggcaagttaatccctttcatctcttccaccatctgaggatgcagcaaaaagtgctaccttgaaaacagagagccagccttccacagacaccacatctgctggctccttgatcttggacttcccagcctccagagctgtgagaaataactctgttgttacaaatgacccagtctaaggtatattgttaaagcagcacagaacagactaggacaggaggcaacttagtctgtccactgcactaaccctctagtcaaattcagtggtgtaagggactccagatgaaatcagcagagatgaacagcccaaacaactcacagaatggtgagaaaaaaaatgctcttttcagctgctaaattttgggcttttttgttatacagtcagagctaaatgcagtatttcaattttgtgtcagaaatggcatcctgctttaacaaaaacctaaaacgtggcatgaaccttgagactaacaagcagacaaaggctgaaaaagcagcttctggaaaatggctggtggaggctgaaagttcctacaggaagctggggggaggatgacatttgtggtgtaatcatggagtactgaatagccatgcctgtggtcagttcaaagatagaaatatacctcatgaatttgtagatagggctcaggagatatccaggcagtatgcagaatatatcagttggctttttatttctcatatgcatttgataagatatagaaagagggggataaagtgaagaagggactgctgaatttgaaagcagaatttagaaaaaatacaaaagaaccaggattttctgcagtggaaaataaaactgttgctcaacttcagtgtttttcaactagaaaaatatgctctgagtacattaaaacctgggtgaacttggaagggtgctaccagcaaaatatgccctcagggtcaagattaaattaagggtatagtagggaaggtcaaatgcaaacttctgacactgtccctttggtcaagacagtaaataagaagcaatgccacattccaggtaaaatgtcaggaagcagagctcccctcaaagattaaaagatgcaatggttccccctatattcctgagtttaattcactaatacagccatttaagaaccagaggatacatcaggaacacagatggtcatggtatatcagagaagactcctgtggtaagcttaaaggcccctgcctatacctaggccctaatctctgtgagtgttgcctttgtatggcaaaaggaatttgcagatgtaattaagttgaaggtctagagatagggagactatcaccagttacccaggtaaaccctgaatataatcactcatgtcctactaagaaagaggcagagggagattagaatacagaaaaaacattgtaagttgggcaaaggacatggacacttcttaaaagaagatatacacacacggccgggcatggtggctcacgcctataatcccaacactttgggaggccgaggtgggcggatcgcgaggtcaggagattgagaccagcctggctaacacggtgaaacccggtctctactaaaaatacaaaaaaattagccaggcatggtggcgggtgcctgtagtcccagctactcaagaggctgaggcaggagaatggtgtgaacccgggaggcgaagctttcagtgagccgatatcgcgccactgcactccagcctgggcgacagagcaagactccgtctcaaaaaaaaaaaaaaaaaaaaaaaaaaagacatacacgcagccaacaaatgcatgaaaagaaaaggtactcaacatcactaatcatcagggaatcgcaaattaaaaccacactgagataccacgttacatcaatcaaaatggctattactaaaaagtcaaaagacaaaagatgggggtgtggaggtggagaaaagggaacacttatatgtgttggtgtgaatgtaaattaattcaacctctatggaaaacagtatggagacttctcaaataactaaaaattaagttactattccacccagcaatcccgctgctgagtatctacccaaaagaaaagaaagcattctattaaaaagacatctgcactcagatgtttactgcagcactattcacaatagcaaagtcttggatccaacctaagtgtccacaaacggtggactggataaagaaaatgtggtacatatacactgtggaatactatgtagccagaaaaactaataaaatcatgtcttttgcagcaacatgaatggagttggaggccattatcctacatgaactaactcagaacagaaaataaaatattaaacaaggccaggcgcagtggctcatgcttgtaatcccagcactttgggaggccgaggtgggcagatcacttgacaccaggagtttgagaccagcctggccaacatggtgaaacttcatctcaactaaaaatacaaaaaattagccaggcattgtggcaggtgcctgtagtgtagatgctgaggtgggagaatcacttgaaactgggaggtggaggttgcggcaactgagatcgcaccattgcactctagtctgggtgacagagaaagactctgtctcaaaaaataaaataaaataaaataaaataaaataaaataaaataaaataaaatattaaatgttctcacttaaaagtgggagctaaacaatgggcacacacagacataaaaatgcagagaatagacactggagactcctaaagtggggaggttgggagggggaatgagggtgatgggtgcattagaagctcacttccctccattatgcatgtaatatccatgtagctaataagcacatggacccccttaaatctaaaacttaaaaaacaaacaaaaaaggaatacagaagaagaaggaaatgatacaactgaagtcaacactatgctactgcctttgaagatggaaggggcccttagccaaggagtgaagctctagacagtggaaaaggcaagaaaacttatccacttttagcactgctagaggcagcatagcccactgtcaccatcatttcggtccgaagaaactaattttggatttatgacctcccaaactgtaagagaataaatgtgtgttttgtttgttgttgttgttttctgaaatggagtcttgctctgttaccaggctggagtgcagtggggggatctgggctcactgcagcctctgcctcccaggtgattctcctgcctcagtctcccaggtagctgggactgctggtgtgtgccaccacgcccagataatttttgtatttttagtagagatggggtttcaccatgttggccagaatagtcttgatctcttgacctcgtgatctgcccgccttagcctcccaaagtactgggattacaggtgtgagccaccacgcccagccaaatgtgtgttgtttaacaaatttatgttaatttgtttcagcagccataggaaattaatacaaccacccaaaacttacctaagtggtagccccaattatagcagctgtagcagatattgtatttttactagaatagaccaacccaacctctgacataaataacagctattggtctagtgaaagcatccgtttcaattcctatcatcaagacagatggaagacatttgcattcatttgaaaggacagcagcagacactcacagtgttggcaaacctctgggttaacgctcctgctctctgttgcaatatagtccagttagacctgtcctgttggcactccacggaatatcccactagtccataacattgatgacaccatggtaactgaatctagggggtataaagtggcaagtactgtggctacaccagggggtgggagataaaccgtttgtagattcaaggtgacttgtggaatgctggaaagtgcttctcccttgcaactcttactgcaagataaaggtgcaactcttaataagtctcttacctttggaagcagcacacaccacacttgggaacctacatcgctccactcattaaatcactcagaaggatgctgcttttgaatgaaacccagagcaagagatacctctagagcagattcaggctgcaatacaatccccactgccagtgagtcacatgacagaggactggaggtatctgtagcaatcaagatgtggttgcatcttaggcaagtcctaacagaagagtctcagagaataaccctggggttttgcagcaagtccgtgtcctcttgtgttagtctgctggggctgctattacaaaataccacagactgggtattaaacaacaaaacaactaagcattaaacaacaaaatcgtattttttcacaagtctagaagttagtattccaagatcaaggtgctgtcagaactgttttctggtgaggcctgtcttcctggcttgcaaacagctgccttcttgctgtgttctcacatgggctttcctctgtgcttctgaggaaacagagagacctctctcgtctctcttccttttcttataaggacactggtcctattggatagggcccaaccttatgacctaatttaaccttaatgatctccaaacaggtcacataaggtttcaacatataaatttgagggggactcaattcagtctatgacatatctgcaacagaaaattatctacaatttaaagctcctggcatactattggaccctaacagaggctgcacacctgatcatagggcatcaaatttcttcccaatatgatttgagttttgcctcctgagctgggtgttgtcagcccactaattaataaggttaggcaggtataacatcattttatcatatagtggcaataaaacgtttgggattagactgagtagatccagaggacacaaataaattaaactaccacttggcccagaccctcacatcccctatctttgctgcacagatgggtcttcctcattccatatctatggctttatgaatgtttactaccaccagctgaaaaaggaggaaaaacatgtttggtccactgataagttaggacaatatgttgttacaagcccaaaatggactgttgctaccctttagttgcatttcagaagtaaagaagacttctcagtggctaggcttaagcagtacacctggttattagcttgtattagagtgagaaatgacctaagataagaatattcaggacctttggctattatgaatggctttgctggttgttcaggaactttggatggggttggggggctgcaagaggggaaatgtcccaggataaagtatgcagatgtatctatgagagtggccttgaggtgtgaagatagttctatcacatgctcatacccactggagagcacagatgacagaggaggcactgatcaactaagtagcttagatgatcaatctttgcccactccagtgcctgtaggatgggtccatgagcagagaagctacggtggcagtgggtggcagtggtgcaggttatgtacagttccaagtgggctcttgctcatcaggactaatgcagccactgtcattattgaagatctgatggatgagtactagatgccaaggttgagccctccatgggtaccagctccaaagaacagtgtgccagtgggttctccagaaagaagatgtcaagatggagtcagcaatacaaaagaattgttgggggtaatgcctgtgaaagatagagggaagagggggtagactaggaagggcaagcctgccagatgtaaggcaaactttcccaggaggagtgagaagggaggagggctgggtaggacaaaattccatctgagacatgagaaataaaaataaaattctaagcctccacccaactgaatagtaaacctcctcttggttaaagggaccccagagtgaccttgcaaactgaattctcgaccatgacaggagggaggtcggacacacctcattatgtcccctcccttgctaaccaccactacaccttcttccctaagaaccaaacagaaaccagccctttcaacagactccacactggtatcaaccaaccacctaatgctgccactgtcttttgcagtttcaacacaactgacccgcatttttttcccaacaagagaccactgatcatggcatggttctggtgagtctatggagaatgcccagtttttgcgtcctctgcttcaccttttaatgtcagagggctgaaaactccaccttggttcatgctaacaccatattttgtacatgggacccatgaaggggcatgaagctccattgaacatgtgcgcatttctcctttcataaatattcatgactactcctatagcttattaaatatgtatacttagccatcctgctcagcatagatgtctgttcctttttcttctccctccaagggttggtttttcatttctgatcagaggctatgcttcctggcccgtcagaatgaccaccctgcaggctgcaaccctttataagaaataaagctctcttttccaaatttatgaacctcatcattcttcaggtggcaggtgcaactctaagaatgtctctgccagcccaaagggaagttctggcagaaggactgatggctaggaatggtgcctggttccactgcatgaggaatctttggtttagcttgaaaccagaggtaaattctgaaggcacccatagctggaggctactgtcagttaactgagcttctatgactgccacagttaccagctagccatatggtggcaagtggactctattgggcacattgccccatggaggaagctgtgtttcaccctcacttgggactgtttcatattcttaagaataatttggcttctctgccggaagagtctcagtgtctggttgttcagagaatctcacatatcattggctcccaccaagggaccaaatttacaatgaaagagtttccacaatggcagataaccaaggactccaatccatggtatgtgcattggagccagtttgtattggcttaggagagttggctgttaaatattcaagaattttgagaggcagttgtgaaatctctgggtgattgaaattggcaatagcgaaagcatttacataacaaaacttgggcaatctttacaaatcggacatccctcccccttcccctacacacaaaccagtttacaaacacaccactgagaccactggtgctaatacactacatcacccagagctgccagcagcctgagaaaatgctgaaatggccacttcaaggacatgagcatcagattaggaagagtcctttgtgggtttaggggtggtatttttcaaaatgcaatctctatttggaaccaaagactatgtatggtactgtgtccacaatagatagggcacacttgtctgggaaccaaggagtgaaaataggaggagactctgctattaagtcaaatggcccacctggggaatttctgctgcctgtccccaaagcttcaggctctgctgggctagacaccctggaagaaacactgccaccagggacacagtatggattccactgaatctgaagctgcagctgctggcttgtcatttgcagttccttacctcagtaaacctgtaagcaaagaaaggagttaccagcctgacagggtattggccaagcttatcatgaatgacagagttgctgctgtgtaggggaagccaggaggagtttttggagctcagggaacttacttgggcagcaaatcttgatgattccttgtttgttgataactgctaatgggtaacttcaaagccatggcttgacaaaggtatgagaaccaaatgcccagatccatcaggcatgaaagtccaggtgaccaggcaagcagcctatagcatgctgaatgctgatagatggtgataggagcatagaagtggtggcaaaggagtgagatattgaataggaagccccaacctcaggagcaactggccccagctatagcttgtcccacaaaatttcctgttgatgattgacaaactgtgattgaccatgaaaagaagttgttatcagggtaaatttaatgtgggtcacaagtggacctgaggggaaaaaggatggaccatggtgaatgctgttggtctcccatccatattcctcctagccatatcagtgcagtgagccagctgacttcaaattgccaatacctgtgtcttttttcaggaagactttttccaaagtcatattgaagccagtctgcctgcttgtagcacagcctagaaatccaaaaaattaatattcaccaggaccagctctccattgatgatatagcccccatgctaaaaggataaccctaagacataggttctatatcattttctagggggttcccacaggattcagctctagttagccacagttggatctggcttagtaatgaccctgccacaaccatggaaatagaaggggattcctttgttttaaggtctttcttttctctttccctttcccttcctttcctttcctttcctttcctttcctttcctttcctttcctttcctttcctttcctttcctttgtttctttctttcttttcttttttttttttttttacagagtctttctctgtcgcccaggctgcagtgcagtggtgtgatctcagctcactgcaacctccgcctcccgggttcaagcagttctcctacctcagcctcctgagtagctgagattacaggcatacaccaccacgcctcgctaatttttgtatttttagtagaggaggggtttcactgtgttggtcagtctggtctcgaactcctgacctcaggtcatccacctgccttggcctcccaaaatgctgggattgcaggcatgagccactgcacccagccaggttttcttttaaccttacagtcactgtctcacctgtctcattttcccactcccctatcagtgtttcagataccacccagataaataatttgcattttaatccttatagcaggatccacttctaagggaaaccaaaactaagacaagtggatgcaataaatatggagaaaggcagattccaaaactattttttgaataagatttgcaggtgggctgaatgtggcaactgaaagaaagagagaaaattgggaatgatgcctggatttctcacgtaagcaagtgggtagagaagggtatcatttactgagatgagaggtaattagaagtatagaaaattaagagtcccattttgttaacattacatttgagactttttttttcttttagtcagggtcttgctctgttggccaggctggggtacagtggtacgatcatgacttactgcagtctctacctcccgggctcaagcaatcctcccacctcagccttccaagtagctaggactacaggcatgtgccaccacactcagctcattttttacttctcgcttttatagacatgaggtcttgctaggttgctcaggctggtctcaaatgcctggcttcaagtgatcctcccatttcagcctctggtagtgctgggattacagacaggagccactatgcccagccatacatttgagattacgataagacatcaaagcagagattcaattaaagtcagagctagagatacaactttgggaagatggtaggggtcagaaaaaaattgggtgtcaccatgggactttctatgaccattaactgtggtcagaataagctgccctctgccccaggcactaacaatattaaagagagcggccgctgcgttggcttgggccccagagggaggacacgtggagcagtgccccgccctccatggacttggcccacagtgaagaataagtcttatttttgtaagcctctgtgaatcttagatgtcgctacaacggcagacactgcattactcttaactgttgcagaaacccctgcttattaaaacaagagggaagaggcaggtgaggaacatgatttcagttaggctgaggggtctgatgttgagaaaataaatgagttcacatgtagcattagtccagaggaaaaaaaaaacagtataaacaccatttccattccccaaatcagagcgctggaaaaagtcatctagcactgtttttccagctagtataacaggagtgtgacctttacctggactgacatcccagggtgtgtgtaatcaaatgtaaaaaattcattattgtgtcgactcttaattgattgtataacagagaatgcaggtcacacaggagccccagaaccgtttggctgggatttcctcatgcgctggttgttttgctgcgggtttactttctgctttcgtttttttgtctgctcacattaaaagtcttcattactcctgacgggcaggtggagacaggcagggaaggaaggtctgggttaggattctccaggcacgcccactggcagctaattgaaagccagttgcatcctctgaaagacctgaatggctgactgcctagaggggtgggattcccgcaacccacttccctattcagagcattcttcctgcacctgctcactgaagtctgaaatttgtttacaggagacacagacttttattcccagattagagcttaggcttccattgcaaaagtccagggagaaaggttgtgtctcctgtaaatgaggaggagcagcagtgcgtatggaggaaggaggtgcacaaatcaggccgaaacaggaaaacaactaagtttttacaacaggaggagtttaatgcagctaaatggttacagaaatcatgtaaacccagagattagtaagaaaagaaagacacgactttccctgggccagtgggatcaagggaggaggcagagtttgtgggaccgaggtcagccctctgaaactcagaccacagggacatcccgtgccagagccagagccacagaaaagaccagctgctgccagagaagctgcccgagacagggaggaaggggaagatacaccaggcttctcgcatcctgcagtctccccagtgcatctcatcgctgtccccaactggaggcaaaggcggaagcctgggaaaagcagcccatagcagtcagatcccttgctatgcagagcagagcaaaggaagggcaacatatgaatcagtgggaaaacagacacggaaagtgcagctcccaggacctggggtggctgcctaatgaaacacaattccttctgccgctgcacccctgccattccccatttttaggaatggctgctcccttctggcttccgctcctcagccctgatctagccatgagctctgaagaggtataaacgatcctattacagggccgggtgcggtggcactttgggaggccgaggtgggtgggtcacctaaggtaagaagttggagaccagtcttgccaacatggtgaaaccttgtctctactaaaaatacaaaaattagctggtcatggtggtgcgtgcctgtaatcccagtgacttgagaggctgtaacaggagaatcgcttgaacctgggaggcggaggttgcagtgagctgcgatcataccactgcactccaacctggagtgcaagactccgtctcaaaaataaaaataaaaataaaatcctattacagctgggtgtggtggctcatgcctataatcccagcactttggaggctgaggtgagagaattgcttgagcctagaagtttgagattggcctggcaacatagtgagacaccatctctatacacacacaaaaattagctgggtcatgttggcttgtgcctgtggtcccagctactttgggggctgaggtgggaggatcatctcagcctgggagtttgaggctgcagtgagccataattacaccactgaactccagcctgggtgacagtaagaccctgtctacaaaaaatggaaaaaaaaaaacaactgattctattgcatgatctcattcccagccctttgtgattggacaaaagatgggcacatgacctgggtgggccaatcagagtcttctctgggatttttcacactggggcgggtggagaagagtcctgtctgctctggttgtggagtggaaggacaggagtctgtacacccccatccttgacctgtgatgggaggcaaaagtgatttaagtagatggaacatagccaaagtccatgtgcagaggaaagtgaaaggaacgggagaaagacagagagggggactagagacccgatagcttcctgtgccctgactttgggaagggccaaggagagctccatcctgctccttcacagtgtggttgctggagcctatagatcactcttctggcttaaagtaggatatcattgttctgtccctgataactgcaacacagaaacactcagagcaagtgggagaaagaacacagggcctgacatcatactaaaactttcactaagaacaaacggggctgagagggcaaggaaggtcaggcagtccaattgcaaacaggcaccagcgagcaggtggctaggataccaatgtgcagagtcacagttttctcgagggtgtcagaggttcaaatcccagcttccttccaggcagggacggccaatgagaagtcagctgaagtcatgggacagaactttcgggaaagttctgtcaaagaggagaggggttgattgagaggacaggctcctttctctacacccatcactgccagactcacccccctctctcccttgcatcacacagattcatcggagaatcaggaacctgagggtccttgcccaagacaagcagagctgccaggaggagggagacaggatcctccatgccagtggagctgcatacagctctggctgctcacagctttcattacctgaggaaaaaatacgatgttttcattcttttgtgtgtttttctgttattttgttttatttaagccactaatttccacgtcttaactattcagggctgatagaattcctaattgacagaggacccacgtctgcctgctgtgttagtccgctcatgtggctatgaaggatgcctgaggctgggtgattgataaagaaaagaggtttaattggctcatgattccgcgggctgtacaagcagcacagcaccagcttctgcccagctcctggtgaggcctcaagaagcttctcctcatggcagaaggcagaggggagcaggcctcacatggtgtgagagggagcagagagagaggaggagtgtcaggctttctaacaaccagctctcccacaaactaatcaccaggaggatggcaccaagccatccatgagggatccacccccatgacccaacgcctcccaccaggcccaacctcccacactggggaccacatttcaacatgagatttggagggaacaaagcatcccaaccatggcaggtgactttttgtgagatgcctttttctcaaatgaaaatctttgctttcaggatctccataagagatccttctcctaggagaaggccacgtcttctttatgccaagggtgagcccagtgaggatgaaaaccccacttgaactgtggttcatgggccagggccacgagctagcaagggacacccagccggagaagcctggaggcctgcaggacccgcagaggggctcatgctggggaagtgatgtgcacgggatcctccagctctgagagacagaaagcatccagaggcactcctgcatgttcactgcagtcccaaatcagctcccttgcctctctaatcccaaacctggccaagggactatggggggttctttgactaatccactgtatcattagctccttcctttctgcgctggttaattttatgtgtctgcttgactgctgtggggtgccaagacatttggttttattaaacattattctgggtgtgtctatgaatgcattagtctgttttcacaccactgataaagacataccccacgctgagtaatttctaaagaaaaagaggtttaatggactcacagttccacgtggctggagaggcctcacaatcatggcagaaggcaaaaggcatgtcttacatggtggcagagaagaaagaatgagagccaagcgaaagtgaaaaccccttatcaaaccgtcagatctcatgagacttaatcactagcacgagaacagtatggggtaaactgccccaaaattcaattatctcccactgggtccctcccacaacatgtgggaattcggagagctacaattcaagatgagatttgggtggggacacagccaaaccatatcaatgagggtgtttctagatgagattcacatcaaaatggatagacaggataaagcagagttactcaatgcggcggcagtggtcagacgtggggggtgcggtgggggcagggctcatgcaatttgttaaaggcctaaatacaataaaaggctgagtgagaaaatattctttctctctgtctgactgtcttagagctgggatgtctgttgtatcctgcccttggacttgcatttggactgaaactgataccatctgctctcctagttctcaggcccttggactcacactagagctaaaccattggctctgttgggtctccagcttgatagctgtaggacttggacttctcagcctttataatctgagccaattccttatagtaaatctgagccaatagtaaacaggagctgattccctatagtaaatctctttgtatatccacgtgtctacacctatatctatatttatttctatgctactggttccattactctggagaagccaggctaatacactccccaagacaaaggcccagatcaaaggagaatgggggcagcactcccagcagagctcaggctgctgctttttaccaagacccctgccttcaaagaatctgatcttcaaatctcactgagggctgagggtgtcggaattattcacacaagggcatatctttccagtctcacaaggattcagacttcttatgtttattaagacaaaaatcctttaaaaataatagtctgttaagatttgcttccagtgctctgttccccagtgatggccctaaagacgtgcagtagagagagaggatcctacaggaagattcagggaaccaaagattgtcgctgaaagaccaggcccagctgggagcagttttaatgcttctgtttacaagaaggaacgaagttcagaaaagttgcttttctgtgcaaaaatgtcagtgactgtgagctcagatgcaggggagtgcaaagtggttaatcagtgtcacataaaaataacaaagacccctgggggcccttaactcaaattttgcaagtcatgcaggatgaatggagaattcttcctgggccttttttaaaaaatctgtttttagtagtggggaggggacagtggatgggcaggaagaagattaattatctgtgatgaacagattggcgaggccgggattcttccaacagaacaagcctcattcatggggtccctcggaggtcatcctcccagtgctctcagtgtgggggtgtggggttttccacctgcccacctctaggagctgaatgcttcatgcagaaagccaacactttagcccagggtcaccccatggccgaggacagagccccaggcatcagggctctacatgaagcagactgccccccacccccaccattttcccttagacatctatggtgttgaatgtcacagcatgagcctgtgctgctccagaagatcacatgccacctgggtgtctgccagtggacctgggcagcccaccctctgctagcaccttgcctgatcagtcttcctgagggctttctagaaggggtcacataggagccagacatgaagcaaggcttggtggcaaggcccattgtccagcagcccctgccttgtccctcagctccgaggtgtctgtaatattgtgggactgctccaggcatgggttcaaccttatggcacaaagcctataagcctcagggcactccacgcaggactaggtttcccagggaacaggctctgagatggagagaagcagtcacgatgcttactagaagatgctattgggatcaatatctgttggatgcaggggaaagaagcaggattaggcagagggagagggagatatccggctgggattgggaccaacaaagactgcagccgccttgcagggagctttggagcttcagtggccctgcagagatgctcctgatgggggaggggctgaaactttatagccttcattgaccagttattgggaagcctatgtcaccttgggtgtggcttttttttttctttttctgtaatttttatttatttatttatttaagagacagagtctcgctgtgtcacctgggctggagtgcagtgatgcgatcatagctcactgcagcctctacctcctgagctcaagtcatcctcctggctcagcttcctgagtagctgggactacagatgcacatcactacacctggataatttatttatcgatgtattttttagagacggggtcttgctatgttgcctaggctggtcttgaactcctgagctcaagcgatccttcttcctcaggctcccaaagtcctaggattacaagtgtgagccactgcacctggctgaggctgttttcttcagcaaaaatactatacaaagcacagctgagggccatcttctgctgtcctccaacagcttgggaataaatccttggctgttgaaaggggtctgggttgcatatacagtgtcccctcaccctccctaggccctagctccaggaattctgtgaatgctctcttgggctccagctctaggcccaggagtcctctgccacaatgaccatactctaagcttgagctaaaacacgtaagataaaccatactttaccaaaggtgggattgtgatgaaagaaggagaagaggacactagctgtgaaaggaaagctggatgttctaaaggcaaacattgtcctgcccaggggcctttctacttttcatttttattttactttatttttctcttatttttattttattttattttattttgggatggagtcttgcgctgtcgcccaggctaggggtgcagtggcacgatctcagctcactgcaacctctgcttcccgggttcaagcgattctcctgcctcagcctcctgagtagctgggactacaggcttgcaccaccacgcctggctaatttttgtatttttcatagagacggggttttgccatgttgaccaggctggtctcgaactcctgatctcaggtgatctgcctgcctcagcctcccaaaatgttaggattacaggcacgagccaccgcacccaaccttattttactttatttttaatgcacctaactaacagtgaaacagataaagtcttgagtccacgggtcagtctgggtgagacttgcccactctctcgacatttcaccttctttcatggcaacattctggtggacaaacctcacattagacatacgctaaggcttcaaccctgagcatagcccattctccaaaatcagccccacccactgaccccactgggtatgcgatcgcctgtgtgacctcctagcaatgagtgattggatgagaggcgagcgctggcctcacaggcatgtgagctgggttagtccatcccctctgctacaatccacaaggggctggtgaagactgggtcacttggcagtgggacccgcagcagaacagtaatgacctagaaaggacccagcacaggccaccgcttggggtacgagtgagcagaggagcatcccagcagagaaaaggaagcttaagttcacagccggctggcaaggcgggaaagctgggagcagcagctgctgaccagccagcttcctggacacaggtgcctggcactgagctctccaagaaacttgccctcatgggaggtggccagggtgggcaaagggtgaattctggctgacgggacttgaggaattgccaggggcttcagataatcatttcttctttggttaaaaaagaaagacagctgtgtcctttagtccttcctgcttgtagatacagaatattcagatctccagtagccattctgcaaccatgaggcgagatggagagaaccccaaggaatgaatttggcagactccgagcttctaaaatcccacaaacatcctgcttttatatttaccaccctaatagaaaagcgcagtcctgtcactgaagtcactgccatcccaggagccttgacttacaaccaaatacttcctcgcagaacaggagcaaggatggctaccagggacagcaataagcgcagtttcaggagccccatcctcgagtcggtttcatggggagaatgtcaaagaagggctggtgcagaagcatgttcagcagtttcctcaggctgccacggcagatacataccacaaaccagacacttggacaaatatattctcttatagccccagagaccaggagtccaaaatccacaggtgtcagctgggccatgctccctttgaaggttccaggggagaatccctggcctcttccagctcctgggggccccaggcattccttggcctgtggaaacatcacttgagtctgggcctctgtcttcacatggccttctcgtgtatgtgtgtgtgtttgtgtgtgtgtgtgtgtgtgtgtgtgtgtgtcctcttcttagaaggacaccagccattggattttgggcccaccctaatccagtatgacctcatcttaattaacgtgcagaccctatttctaagtaaagtcacattctgaggttcgtggtggatatgaattttgggggatactattcaactctccaaacatggatgactatttccaggtcagtgtgaggcccactgctggtattttctaaatcactcagagaagaaagttttcagagaaccgaggtcctgccaggagccagtgaggtctgaattactgttgtttagaaaaccagaaaacctgctctgaccagagtgctctgagtcctggagaaacgcaggtgcctgcagcattgagcgcaacgcaggtgtgttttcaggactaatgaatacctgcaaatgccaccaagatcttggagacataatttctgctcagtcacacaagaaaaccagactgcaaaaggaacagggcctcgaggcattaagggagagttaatggtaccaggaggtctgcaagggtcgctgttgaatatcattctcaacgagctggtgggaattcacatgtctcaggcaccgcacagaacagccatgggcttgcctctcctctttccgagcagtgaagaagcagaggggccttcagggagacagagctgcctggggcccattgacattaaatagaagaaaatttgcatcttggccgaaagaaaaccaccatgccttaggctgtgaataaaagcacccagtctgcacccacacaatttagcagcaggttggagacccaaacgcctagaattccttggactactatgcaagtggccctggccagaagacattgaagaatgagagttggctcagggcttcagagggtgtcaacccatcatgaccatgctctttttacaaaaggaagacccaagaccagcagagaggaggcggtaggctgcggtcattgagtcggcccacagcagaaccaagtggagctgggaccatgtctctgcactcgggccacaagtttccctttgtgcattttttttttttttgagacagagtcttgctctgtcctctaaactgaagtgcagtggtgctcaccgtagcctcggacttttgggatcaagcaatcttcccaaggagctggaagtacaggcacatgccaccttacacggctgatatgtttattttctgtaaagacggggtcttgctatgttgcccaagctggtctggaactcctggcatcaaatgatcctcccggctcagcctctcaaaatgctgtgattacagacatgagccaccgcacccagcctgtttcccttctgaaggaaagtgagacatatccagccctgtaatattcctagactgggtaacagtcctcacagtcctctttctgtcctgtagagattttccccaaaataatgcccaggagcttcctgactatctgccaactgtcactcttgtcatttgaggcccggggattttggggacgtttctgaggttcactgtcactttcccatggcctgcacagccaaaatgcaaacatagccaaagccagaagccaaggatatagtgacaggacgttctcaccagggacgtacctgagcaaatgacgtccatcagcccagctcacagagacgcctgaggctcaattttgtccggagcccagagaaaggctgggtcttgaggggcagtgcctgttgggtgggagcgcctcatccagctttctcatttcaggtgggtaattctgagcccaagaggaatctgaaattcaagacaaagcttccaagagcaatgcactgtcttcattgtcttcttgactcttgatgggattatcttatttatttttgatgggattcactgcccagagtgttagaaatagaaaatcaaagacagaggtgtgaatcagagccgtgctgtggttttcttactcgcctgtgatcaggtgtgtgcacctagatcactaaatggaactgtgtcccgccccaccgctgctggctcccagccagaagcctacatatccccagggcaggacagaggtggtacagctgggggcaactggctagattccttacatataccctcactgagtatcaacctcatagggaaactgtgagactgagtttccttcttttaaagtaagggaacaatgagatcatacttgctcataattaactcaacatttgttaattaagaagccagacctaagctacagggtgggaagagactgggaagtgagaaaccaactggcccttgactttacagagctttgttttttttcaacttttattttagattcaaggggtatatgtgcaggtttgttacatgagtaaattgggtgtcaccgaggtttggggtacaaatgatcccatcacccaggtattaagcatagtactcaataggtagtttttcaatcctcaccctcctcccctccacaccctcaagtaggccctggtgtctgatgctgccatctctgtgtccacatgcgctcactgtgtaactcccacttataagagaaaacatgtggtcttgggttttctgtttctgtattaatttgctgaggataatgacctccagctgcatccatgtgtctggaaaggacatgatttcatgcttttatatggttgtgtagtattccatggtgatatgtaccatattttcttcatccagctcactgctgattggcacctgggttgattccatgtctttgctattgtgaatagtgctatgatgaagaaactagtgcatgtgtctttagggtggaaggatttgttttcttttcaattatatacctagtaataggattgctgggaagaatggcagtgccaagttccttgagaaatctccaaacagctcttcaccatggctgaactaatttacattcccaccagcagtatataagcattcccttttctccatagcctcgccagcatctgttatttttttactttgtttacagagcttttgcataagagagagataggatacaatcacaatagcaaatgggaaattgcaactgtggtcagggccatgacagagaggaagattagcaacttcttctacaagaggcccatgtgtgatgtgacccagtcaaggaagtcaaagtgaccttcaagttgaagcaggaatggtgagttagagattacttggcaaggaaggaagggaaggacactccaagcaaaggaacagcaaggctcgggaggatgcggtaagtgcaaagatggatgcagggcagtggggctggggggcaggggtcggttggtgggcgagatggccaaggtgagcggctctgtccatgcaggcagcaatggaaagcgatggaaacctcatgagtagatattgatccgattggctcatgcttcgaaataaataaagcaaaagaaatgttgggggtgagggcagcacacagggcctgcaaggaggctctgttgatggtccaggtgacagagaacttgaaatgcaggatcacacaggtagtaggagccaaagcctggactcaagctacagcctaggaccacttatccactgctgatgggaacgcacatcggctcagccagcagttcacatatttcttaaagaactaaaaatcaaactaccatctgacccagcaatctcatgactggtatagacctgaaggaatataaatcatcctaccacaaaagacacctgcactcatgtgtttaccacagcaccattcacaacagcaaaggcatggaatcaacccatgtgcctatcaatggtgagctggataaagaaattgtggtacatacacatcacggaatactatgcagccataaaaaaagaacaaaatcatgtcctttgcagaaacatggatgcagctggaggccattatcctaagaggattaacacagaaatagaaaaacaaacactgcatgttctcactgacaagtgggagctgaacattgaacacacatggacacaaagatggaaacaacagacactggggacacccagaggagagagagagagagagggagagggcaggggctggaaaatctacctattgggtactatgctcactaactgggtgatgggatcaatcgtaccccaaacctcagcatcacacaatacactcatgtaacaaatgtacacaggtacccaccaaagttaaaataaaagttgaaataaaatttaaattaaaaacaaagccaaagctagacccactgcactcagcctcgtaggtgagtgtcttaaccacatcaggaactccttgaggcttgctttggaaagaatctccaggtggggcagctcatgcctgtaatcccagcacttcaggaggctgaggcaggcggatcatttgaggtcaggagtttgcgaccaccctggccaacatggtgaaaggctgtctctactaaaaataaaaaaattagccaggtgtggtggtgcacgcctgtaattccagctactcgggaggctgaggcgggagaatcacttgaacccaggaggtggaggttgcaatgagctgagatcgcaccactgcactccagcctgggtgacggagtgagactctgtttcaaaaaaacaagaagaaagaaagaaaaaaaaggaaaacaaatctccagcactgtgccctggaagggctgtccaaagaatgacgtgtttgtgcatctccagggtagatctctgaaagaaagcatccaatatccagggtttgacatttcccaacagatagcctcaagctcccagtaagggcctccaggacaggccctctggggcgtcggtgctcccctgctctcctgggaagatgatgctgaagttcagcctcaatagcccactgctccttcagtcctgcgaggtgaagacacaacttccacataccacattgtctagagaaacaactaaattactagttttaagcaaaactggaaatcaacacctatccctaggtttctggagctaaatgggctcagagatgtggatgacagagtacaagtcaaaactccatgctgtaaaatactgcacgctttttataaatgttaattggttagagtatcataatttttacacacatgtaaataaggttaatgaattttattccacacagatgatttaaactataaaacaatcaaattacttttcaggtaatactttgggcccaaatgaaataaaatttcaagtcattataactttagaaaaagaaactaatttgaatatgtgatttagatccattaaaagtcttctcaactttaaatagtgataatagaaatcagaaaagctcgagagtggttaagattaattaagagtgaatgcatttgggaaaaggaaattatgaggctatgattttagaatgcaaatgaggtcaagaagtttaaactaatgtgcatctatataaacacagcctcaataaaggaaaaatatttcattacaagggtttataagtactgtattctctacttcttgttacatgagtagcaacaaattgataaacagcaacctgttgtcagctaattacagcacccttgtggctgccaatagttaagctggtacgaaattagaaatcttgattttcaaagttctatgcagcctggtttctttccttatgatgtaggcagtgctggtgacccactcaatcctttgaatccttttgtagtagcccatcttctatttcgtgggcttggttacaaaaggcccccacctgcaagggtcttcaggcgctttctcttgggctaccagagccacctcctccaagcagacagccaggaacgcctggaagctatgctccccacctccactcctcatcctggttaatcactggtatgagcttgcaaagcccaccttccttgccttgaggtggcagaaactcgggtatatttagactccagagcacaggatcaggctatgtgtaggaccttgccctgaaattgcaacactgcagctggacctgtgttagggtccctcgaagtagaccctgagaggaggatttttatgaaactcttttacagagaacactttctgatgaaatgtgtgcagaagtggggaaagcaaggaggagcagtgaagaggcaggcaaagatgtagtttcctctgaagtctggcctcagcctgatcacagagggtgctctgggaagggaggggagacagtaccgtccagttgtcccacttgagggtacggggtgctctttcatattcccatatcagttagcccttggctatgggccaatcctgggaaatataaactttgttaacccaaggtgattctctagagaatggtgagtcaccagcagcccagactcagcaaccgagggatctgctcccagctcagtgaagacaagctgggcgctcacggcctctgctcagtgttccccattcccgatcctgctcctctctagcctgccctttctctttcctctctccttgaaaactcacttgtacctgaatcccaggcacagcttcagaaaaacccaacctaggacaccctcctgctctaaggatcaagaactgcactgcgtttgatgccacagctttccttaacctgaaagctgctgttattttttttccttttttgagtcagggcctcagcccacgctggagtacagtggggcagtcacagctcactgcagtctcaacctcctgggctcaaagtatcctcccatctcagcttcttgagaagctgggaccacaggtgcacccccacacccaactaatatttatatctgtagagatggggtctcactatgttgcccaggctggtcttgaactcctggcctctagtgattctcctgccctggcctcccagctttctgagtccatgtgagggaacagcatttgtaggacggggctcctgcagctccttccagcctaatatccaggttccattcttctagtaacagtgacctgatttttctctgtggaaccagacttctgtcaatctaaaaagtttgtgagcatacagacacacacacacacacacacacacacacacacacacacacacacacacacactcttcagaagggcatttggcctaggcctggccaataagaagtgaggggttggctctgggataggcgtgtgatccaagctgagcctctgccctgggaatgctgctggaatccttgaggaggtggtgctcgcacatctcaagaggcagccgagcgccacctggccacaaacaggtagactctgcccaaggttgaggcaatcacagaagaaagcaaagccgagtagcagagtgtgaaggtgcatggcagcctcatgggagcctggagcagtctctagccctctgagttgtgggagccaattcagtcccttcagctgtgggagctgctcaggccacctggagatgagtttcagtcactcgcaaccaggtggccctcccctgactaagatccctgagaaggatctggtgaaaacccgctcttaggaaattgtctgttcctgagatgtgtgctgtagcattagaagtatgtgctagcatacttctggagtcctggcaactcacatgacctggatcaaggtctttttttcttggcctcagttctcctgtcatattacgggagtgtttggactgtgtatatcctaggagtcaagtcctcagtccaggactctatcctttatgagcacacgccaggtgctgggctctcccgtccaaccctccaggcccccaacactgtgagctctgaggctgagctttcttcacaagggcaaaatcctccccatacttctggccccacctccagggacctgtcttgggagagatttggggcccagcctagatgaacagatccaagagctggggccactccttggcagtcctctgtctgctggagtcacccttgtgctttttgtgggagcacgactctcattcatcatttcaccctccacttcatgaagccagcccaggggctctcccagggccgcgtagccccgtgcatggaaacagtcctggcagggaggggctgggtttgaattctggcttctgtacagagatgtgcaatcgatttcttcaacttttcaagcctcgatttcctcatctactcagtgagaataatgaacattagatgtgagtgtcttaggttgggttgggttgaactttctcagggttacataacttactgtagcggatgctgtcagactctgcccatagttccttgggtctctttaccagacccctgtcctcgcactcaccccgagccagaaggggtgtgtcttagttggaaggttgaccttaaacttccggaatctactttgtgtgcctttaaggaagagccagaaatacctggacatgtgcaccccctcaaccccaccccagccaacacttacccaatgccagacggtgtctgcatatacaggggtataaacacaccaggcctcttgccctgggtgtgggcagccctgagatccaatgcagtctccaaagtcatccactgtgagacttggcttcataccacatccttgctgggtctccctttcttcccagccccactttctacttccctcctggatattcctgcggacagctcccactagggaatcctcacaagcactgtcttctctggaatggggaaacagtcttaggtgctcccatctgatgtgtaatggagtgccctacccatcacacctgttcaagcagtggctgctgccatggctggtacagtccagtgctggcatgcatacacacagtgcacaaatccctggggggggtagacacacacgcatgccaacacacgcacacacacacacagtgttcattcctggtggagacaagatggcgagcacacctgagatgcagtgtagtgatcctcctctaagtcatgtctgagagccccatggaaacaacacgaccgtgaagctaatgcaagaaccaaatccctctcactttaagaaacctatcctcagccaagtgcggtggctcacgcctgtaatcccaacactttgggaggccggggcaggtggatcagaaggtcaggagttcaagaccaacctggtcaacatggtgaaaccccatctctactaaaaaatacaaaaattagccaggtatgttggcaagagcctgtcatcccagctactcgggaggctgaggcaggataattgcttgaacccgggaggtggaggttgcagtgagccaggatggcaccactgcactccagcctgggcagcagagcaagaccctgtctgaaaaaaaaagaaaagaagagaaacctatcctcaggcatgtaatgaaatggcctagggcagttcttcacagcacctggtagcagcagcccctccatgtgtctatgagatgcttaatcagacagcacagtcatctgtcacatttctatttccctttattttccagaaccctattagaaaggtcaggcaggatagaaacagggttaaggagagccatgaggaggcctggaggatattcagtggagacaaggacctcccaaggcttgaaagcatcaagaggccaccaggcaggggtcagcaggtgctggttgctttgagcaccccaagccccagcctggatatgtgtgtcaggggctggtggggaagctgccgtgcaggcgggactcccatgggaaggcacctgggggagtcactctgcctctcaacccctggtcaaatgaaggctggagtgcagagatccactgtgtctaggacacctgcttcagagggacactaacgccaaaggaaacagttgagagagagtgaaatgggagggaggatttacaatgtgatttaagcgcctggattcagtcacacctgaaacccagaacttcttgatttctaggccagttcgttctctttgtagcttcagccagttgaagcaagaccttgtcactttcaacagtgattgtgggtgaatgatatagtgattggaggcccagagctttgtgtgggcacgagtggagccctaggcccccgatcaccacacctagggcttatgcttttgtgccttagcccatacctggtacctataacttgagatacctgaagatatgccacttcctccagacccacagatacccttcaatatgctgccccaaatctcacccccaactgaggagtacatcctgacagtaaacattctttttcttttctttttctctctttccttctttctttctttcttttttttttttttttttttgagacagagtcttgctctttttgcccaggttggagtgcaatggcatgatctcggctcaatgcaacctccgcctcctgggttcaagtgattctcctgcctcagcctcctgagtagctgggattacaggcacgtgccaccacatctggctaattttttatttttagtagaaacaaggtttcaccatgttggccaggctggttttgaacctgacagtaaacattctaacccaagctcctgagtcctgcccttagcgcacatttgcaatgggagcaggaggcgaattagattagaccaggctgagctgggagagtaaataactctaaaatgccatggcttcaaccacattcatttctcatccctgcaaagtccactgtgaatctaggtgactctctggccatcctcctccatgtagtgactcagtgatccaggctgccctcatctggtgaccccaccatctcaacgccaggcctccgcagttgctgcagcaggagaaacactcgggtgggtccctcacagcactcttctaagcttcagctcaggccctgcccacatcgattagccaaaagtcatcccgagaccctgcccaactgggaaggggatttagaagtgtgcctttcttgagagaaactagctgtgggcagccagggtgatgtccccccacagcaggtacaggaatgcagtgtgatgctgaagggccagcctggctgttgagagggtcagcaagaatgggagactggagaagggaggggcacactcttcactcctgctcagagcccgtcactgcacaggctagggactggtgcagccacggctgtgagtttggggtttgctgcttggattttaaaactgctccaaccagctgccatgtttgttagagattgccattgcatgtatgagaaactcaagcagctcagcctcatagagtttgtttgtttgttttctagtgggccaggaaatctagggaggcagctaggggctgacatggcgactctgagatgctacccagaccccaggcttctgggctgtccagcccaccgtctctagcttgtgcttttgttctcaaggccacctcatcattacaggtgttccctggccactccacctcagacaagaagacagaaggacacagaaggacctagaagggaggaatgctacctgggtcgggaagtaaaactttctcaggtgtccccagcaggcctctgcccatgttccgttggccagggcactgggggcctgggaagcaccgtgtttaggtgagcacgtttctgccttgatgaatttgcaattctattatcaagcaagacaggagaatcgatattaggtgggtgaatgaacaaactattaaataacaggcagcttcctacaaaacattgagtttctattggctcttttgaagattgaattcttagcatacaaggcctgcatttcttaatggcaaagtctcaggggatgagtttggacttctccccttaggaggttatgcccccagcattttcttgtctgttggtgtctacttatattacactcagtccaccttacccagggctggcttcacacagtgtgacctgtgtgatatcatagtgttccacgcttggtttgcctctgtggctcctggggaaccagaaaacacatggacatgtaagcagacagggagggtcccccgggattacaggaatttaatcaacagagccatcagcctggtgcacagcttcctgccctgcagcctgcttctcttaatccctgtgagaaatgtggtcacctacttggttaaaaccagctcctgacagagctgggcaacgtataaatgaacccaagagctttcctcatgactactccaggaggagccacagtttcatcaccatgacacgcgacccatttgctggcatgaactcactgcatctgcaccaggggacaccccccctccatgcaatggcgtgccctctcccctctccatcatcccacaagaccctgctgtccctttccctcagggacacactgcttggggaatacgcccatgtcctccttacttgtgccaagtaataaaactcctgttgatcaacacctgccttctcatggagagtcatttgttacttgccaggtaaactcccgtttcatcagggaatagactcaggacctgagagacctggattcagaatcccagcttagagtcattggacaagttacttagaatcctctattggccgggcatggtggctcacacctataatcccagctctttgggaggctgaggtgggattactcatcccacctcaggaggattgcttgaagccaggagtttaagatcagcctgggcaacatagtaagaccctgtctctacaaaataaaaaataataataaaaggctgagtacattggctcacacctgtaatcccagcactttgggagactgaggtgggccgactacctgaggtcaggagctcgagaccagcctggccaacatgctgaaaccccgtgtctactgaaaatacaaaaaattagccgagcatggtgatgtgtgcctgtaatcccaggtactcaggaggctgaagcaggagaatcacttgaacccaggaggcggaggccgcagtgagccaagactgcaccactgcactccagcctgggtgacagagtaagactccatctcaaaaacaacaacaacgatgataataattaatacagaatcctctaatctcagttttctcatctgtttaaagaaataaaaccacttcttcctcagggggctatggtgatcctagacagaaagggcccagcccagctatgtgtacctggagtttccacgacagtcctgtccattattaatgcaatttccatttctgttgtaaagactgcttccaccacacctgcctaatgacaaagcctcaccttcaaagctggggcataaggatgtctgtggctgctagatctggagtaggggctctcagccccctactctcatttgaacaaggcagcaaccatgctcacgggatgccaaggagagagacaagtgaggctggtggcagctggccgagagggtccccgtcctacctggccaggccaagaaagctgttgatgcatcccaagacctagcaagacttactttctcagtcaccttgaaaggaaggacaagcctccaagtcggctccttgggagtggagagaagaagtttcctccactccactgctgagagttacaaaaggagccattagcacttgccaagcaaggccaccttccatctgagggagaaagtgcaaaagacagtttaaaagcctcattaacacaaggcaacaagtcacaggtgaaaattgagcctctgaggccctgctgattgcacgggggggaaggcatttgcatctcttctcaccacagaggggtggcagccaattacctccaggattagaaaaaagttgcaaacctgagtctatcttcactgacgggcttgaattccctgccatgtgcccctcgctaaagcctccgctttgtgtatgagaaaaaaagcctctaagacctgtgggaaaacataaaatctggaagcaagttcacccgtggctgaccagaagcagaaatgttgcttcctttgtgcaagcccttcctggctgggccagaacatcagctaatgcagcctggcacgtggtctggcaggataggccctgccaattagaaattcaaacacaatcagtgtaatgcctatgcttttgctccctacaggccgtgcaggaaacagaagccctgcgtgtctgtgtcccctaaataaatgactctggttcattcactgcctcctacccactcccttgccagctgttatgtgtgggttgtggagaaaccccgcagtgccctgcaggggcttcttcctgcccttggggtctatgggaatgctggttgcctacatagtgcacactcaaatgtcttcagcgcccaaggctgtcactttctcagctccctgcctactcaggtctacgaagtcaactgcaaggttgtggtccattctttccacaccaaccctggccacgggaccttagccctttcagaactcagggtgctgaaatgtctgagaagtttccccaaggaacgtcaccgagctgtcccctccccaacaacctagggcagcacaggtctccatccattgcccctgaagcccccaatgtctctttctccctcccaccctcagggaggctcactgacccccgcttaattatgccgtgtcctccgttgaagacctcctcaatggggaagtgagtactggcaggggaagaccacagtggggaattttaggtgtgaagtgttctatgaatacatcttcatctgggcggcggccacacagacacaggtgggcataaacatgaggtacaatggctggacactcagtattcatgcacagacatgtgttactgtgtgtgtgtgatacttcagttttaaaattatgacaccccaccccaaaaaaattaattatcttagaccaagcatggcaaacagccaacatacagtccctcagagtggcaatttcctaagttcaaccaagtatttttggccgggtctgaactatgtgtgcttttaacaaaaatttgtttccaacctttaaaatggaagattttacataaaaattttgaatttctggctcccactaaaagcctaaggggcacttgatctccagttgtagccatttggatttgcaagctctttttcagtcattaaaatacaaaatacaaagaccccaaccagctgctggaaaggtattggggctactttccaggactgcactggacaggggtgggatggggaggagctgggcatagggaatgctgttgtaaatgcagttatttttttaacctttttttctgctatatcaagcaaaaacattaaagtaaaaaatacatataatgtgtatacatatatatacatgcatacgtacctatctatctatacatacatattttcccctttctttcacttaaatcttcactcactagttcctgtttgattatttttttctccctctcatccattgctattaatttctggcagcaatttataaatgccccactactctaagaaccattgaaatcacagttggaaacctcgataatttcaccaaggcagaagcaattaaatgcaaacattggcaaaaatttttaacgctgcagaaaatcacgaaaatgccaaggtaagctcattgctgctgcagatttaattcctactctccttaaaagccagaaatcacctctctccccagcaggacctgaacaagccttaaactagggccatgtgaggccacatgaggatgattcttccccctcccaaacccagcgtggcagagaagcaggcagccccgagggcatgagagatggaagcgtccccctgatttttctcatcccattcaagttcaggactgaaatggacagaacaatagttaaccccacagcctgcagcctctaccactgataaccaggaaaacacagctaccttatacacttctgctctgcgcttttcaaggtcattttctcactagggcactcactgaaagtctagaagttagaaaaatgggaaggttgagggacccctttttcatacacatagaaagacagagctcaagtttaatcagcaatttgccattcaaagtaggataagagccagggtctccaggcttctaatctaaccccactgcttctttcttctagacctacgactcgttccagcaccgtgggggctgacacccatctcactgctggataaaagagaatgagatcctctctccatcctacgttggatttgcttgctcacacaaactgacccttagggacagaattgttcaactacaattagatttagttaactaatcctggaagcgaagcttagcatatcagacagggttctggcaggagactcactgccctcagaaagttcaccctcacaggctgcaacgcagtgactgtctacagcgatggggatgtggcaggggctaaggaagccaacaagagattgtcaccttcttagaggagaaagccaagatggggagatattaacccctatgcgtgaaaacatgaggggaggaaggaatgtttagcccagtgagactcagaggcacgagtcagcacctattacagacgtggtgcagaaacatggaggacatggagaagaaatatcctgaccttgttccactttcaccctccaattccctgacagtggttcccattgactgagcccagctcgcagtcacaggcagggagcaggggtcaatctcctggtgcacaggcaggctgaggagggaatgaatgtaggaaagggctggggagagaaaataagtagcatgccttacttaagagcctcaggatctttatctgtaaaattggatgataacatctacttaatagtgcagttccgagaataaaaactaagatatctaaggcatgcagcactaaaaagtattgaaaattgtaaacttactctcctcatcatcatgagctatgcttcccttaaacaatgctgttctgttcccaatatgaggtatcccgcagattagaatggctgcataattgcttatcctccaggcctcattccccacaaaaggacggcatactttctggagtatagcattcctgaaaagggcccctctagaccatgtttgattagtttcagtgatggtggactaactgcatccccatctcttctgccaccaaatcactcaaaactcagaaaactatttctgtattatcaggacaaagcactccctatgcatattctccaaggcttctgcactcggaggtcaccaggaagagatctgctctgctctctcattcactggagccctacagatctgggaaagctttgggtttttttttgttttgttttgttttgttttgtttgtttgttcgagagggagtctcgctctgttgcccaggctggagtgcaatggtgcaatcttgggtgactgcaacctccgcctcccaggttcaagcgattttcctgcctcagcctcccatgtagctgggattacaggcacccaccaccacgcccaactaatttttgtatttttggtaaagacggggtttcaccatgttggccaggctggtcgcgaactccggacctcagctgatctgcctgtcttggcctcccaaagtgttgggattacaagtgtgagccaccaggcccatccagaaagttcttaagttagatctattcttcacaaaagagaggaaagattggggttgggggtgggaacccagctctttatgccaattaattaacgcacattgaatggacagatttctttttctttttctttctttcttttttttttttgagatagagtcttgctctgtcacctgggctggagtgcagtggtgcaatcccggctcactgctgcctccacctcccgggttcaagcgattgtcctgcctcagcctcccaagtagctgtgattacaggcacctgccaccatgcccagctaatttttgaattttttagtagagatggggtttcaccatgttggtcaggctggacagatttctaaaagacacaactaccaaactactaccactactaaagcccattttagcaagaaatagataacctgagattaaatccatagttaaaaacctttctacaagagaaatactgcaggccctgatagctccactgcttcaatggtgaattctacctaatttttgagaagaaaagtgtatcaattctacaaaattatttcagaagatagaagtgaaaggaatactttctaactaattttatgcggccagaatttccctgatactagaagtagaaaagaatatgtcaggaaaataaaactacagattaatatctctcataagcatgtatacgaatatcattagcatgattttagaaactgaatctagcaatatattttaaaagacaataaaatatgactgtgatttgtgatatagtaagaatatatacgtatgtatatacttggtatattagacacagcaaaagacagcattgttaaattaaggcaaaaatacaaaaataataatcgaaacagaggcacagagaaaaataattgaagggaaataaaagccaaataaagcatctgtaactagccacaaatagcaaatgatataaaatacttgcaagtagaattccagaaggaaataaaagatagaatggggaagaaagggtgtttgaagaactaatggctaaatttttgcaaatctagccacttacctcaaccaagagatgcaagcagctcagcaaaacccaagaaaagtaaaagggaagagaatcacacctaggctcatcatttttaaactccttacaaccaaatatattcacacaaaagtagtcacattagatatatggggaaaatgataaaaatggtggctcacttatcagaaataatggaagtcagaagatgtctttaaattctgaaggaaaaaataaactctttcaaccaaaaattctatgctcagcaaaaatgtccttcaaaaataaacaaaatatgtaattacagttgcataacagctgagaaaatcccttgccaataaacctgaactgtaagaaatgtaaaggaaattcttcaggctgaagggaaatgatacccgatggaaactgttctacaggaaggaatgactgtgccagagaaggtgaggaagtgcaccttgctgtgaggagaaatctgtgctgtgctctgtgtgtgcatcatggcttagcaggacagggcagccacaggcctccctgcagtggacttgggacttcttcaaggcctgaggactggctctcagctgggtgctgggatcttcctggagaagctcttcaaggtgtaatggcctcccccaaaagcagagtccaggttctgacaactctgggtttctttgggagatgaaggcatgcgcagaaaatgttgtcaccattacctagttttgaagaactttatgctctttttttcaaaaaaaaaaaaaaaacagctataaagaataataatacataatttgctttcaacttaccaaattaatttaaagtgacgtgatggcctagcaccatcctcaagagataccaacctttacacagagccatcataaatagcaaatatagaggctgttagtaaaaaaaactcaatgaggccaactctatggctcaccgtgaaataaatttcacagaaatagaactttaaaaatagaaaactaaacaagcaaaactggatgaactgattgctgatattcaagaagccaaagtcattggaccctaaatcataatccatcaaacatcgatggtttttccaaatagatcatgtcacagagtctttcccacatggtccttcaccagaggataccatttgtcttcaagaaaatacttttacacctctctactcatattctcacttttgctcccagactttgtcccccaaactcttcctataattctacatttattttgctggagaatttcatggccaaggtctctatgattttctgcacttccagaaagcattcatggacaccccccacccccacttgacaaaggcatttttctggcctgccacatctttcattgataacaaggacaacatcctccaagaatttatcaccattttcttttcccatgtgctagactttgcccctctcccctgccatcataagaataatactgcattatcttcagggttgaatttcagtgttcaaatgacctactagtgaacatctagaaaagtagaaaaaacaattgacttaaaaaaatattttgaattatctctcattttaattcaagaaactactattacttaagtgattatacttttgcccagaggaagctttatagaattattattcttagcataaaggtttgtaagtaaaattatttagaatattttttgagagcatgctcttatttcagatgccaggttcagcatgcagagcttggaattcatcaccccatcctaacaagcaaaaagctgaacccacggaaaaatccctcttctcagatctttcggaaaagtgaggtcacagggcaaacactgctctcaaaattggagagacagacaggtgaatacagcaactcacaacttatcagagcagaaacccatcagcaaacacctctgagggaccccaagccaggttaggaaaacctcaaatgtcattgacaaattgctggaggctccacatggacaagttaaaaactccagaaggacctggtcatggaggggttgcacgggacacgcttctgtgagttttaccttcaggagctcaaccaggttctcacagtgaatatcagagaaaaatctcctagggcttctggcaggggaaaggaaaaggaaccattttgaaatctttctgagtattctgttattaataaggcctcacaagaaactatttcatcagagcctaaaccattggagttttatcagagccaacctgggaaaaggaacatgcccaattccagcccaccttagcttttcacacgagagaaaggaaatacccagctttagccacctctagccttcaacatggaaacagggaatacccgatgccagtccactctgcccacgctgtctcacctgatgggcaggtacaaaactgagaagcactggtgaagttcacagtccaggggcacgagctcactaaaagactgagagctaattctaggactatagaaggcacccccatatcttatcaccacattactaaaggcctggtaacctcagtgtctggctattacatgcacatgaaaaatttataaagcaaactaaaaggcaaaaaaacaattgaaagagacagcaaacatcgtaagaagactcagatgtagcagagatgctggggtactatcagaccaggaatttaaaacgattattactaacgcactgagggctctatctaatggatgaagtagacagcacacaagaacagaagggtgatgtaagcagagaggtggaaactctaagaaaacatttttttaatgccagagatcgataacacagttacagaaatgaagaatgtctttgctgggctcattagtagactggacacagctgaggaaagaatctttgagcttgaggatatgtcagtagaaattttcaaaatgaaaaagcaagggaaaagaaatctacccaaaacagaacggaatatccaagaaccatggggcagctaagaaaggtgtaacctacatgtaatgggaataccagaagaagaaagagtgaaagaagtgtttgaagcaatatttgctgagaatttcccccaaattaatgttacaaaaaacaaaactacacatccagggagctcagagaacacccagcagggtaaattaaaaaaaaataaaaaaaaaatatatataagcacatcatagtccaactgcaaaaaatcaaagatgcagaaaaatattaaaagaagccggggtgagtggggaacaccttagctacagaggagcgaagataacagttacatcagacttcccagaagccaatctgaagagaccatataccgtatgatcccagctctatgacattctgggcaaggcaagttatgcagacagtaaaacgatcagtggttactaaggattacagggaagcacatgcagggcacaggggattttagggcagcaaaactactctgtgtgactctacagtagtggatccatgtcattacgcatttgttcaaacccacagaatgcacaacaccaagagggccccctcatttagtttatggacctgggtgacagcaaacggtccatgtagtttcagcaattatgacatatgtcccattctggtgcaggatgttgatagttggggaggctgtgcctctgtcagggcgtaagtatatgagaaacctctgtactctctgctcaatgttgctgtgaacctaaaactgccctaaaaattaaaatctattcaaaaatacatgttctaggccagatgcagtggctcacgcctgtaatcccagcactttgggaggccaaggtgagcggatcacttgaggtcaggagtttgagaccagcctggccaacatggttaaaccccgtctctactaaaaatacaaaaattagctgggcgtggtggtgtgtgcctgtagtcccagctactcgggaggctgagggaaaagaattgcttgaacctaggaggcggaggttgcagtgagccgagattgggccactgcactccagtctggcaacagagggagactccatctcaaacaaaacaaaacaaaacaaaaacatgttctaaagaccacaatgaaataccataccactacaattccactagaatgaccaaaatgaaatcaatgttagagagtctgtggaataattacatactcctataccgctgttgagtgtttagtacaatacttagaaaactgttcagtaatttcttaagatgctaagcatacatctaccctatgacccagcaaatatacttccatgtatttatccaagagaaatgaaaatatgtgctcacacaaagccttttataagaatgttcacagcagcttgattcacaataatccaatgtttgaaaactttccaaagtccaccaacaagtgcataaactgtgataaattcacacaatggaaatcacttcagccatgacaaggaatgaactacttatcatacaacatgaattctcaaagtgcactcagcgaatgaagccagacacaaaaaagtgtatgcaatgtgattccatttatatgaagttacagtgtacgccaaatggtggagggatagattgggaaggtgtggaaggacatattctgggatatatgtaaatgtcctgtcttgctatgcatgtgccaaaattgagtagacggtacacttgacttgtgtgtaaattaggcctcaatttcaaagggcatgttctctggtaattacctctttccactagagtccagggcacaaggaatatgaaagcagggttttgatgcaaacagacaggctttagggcaataatcttaagaatactgagctcacaacacagctcaacactcagagcaaagggagggtagcctgtgtcctgcctgtgtagccacctcttctcctgctatacctgactcttcccagaccccaccagagctgtagcaaagaccagggagtggccaggcatggtgggtcacgcctataatcccagcaggagtaaagcttgagtctaggagtttaagaccagcctagacaacacagcaagaccccatctctaaaaatcatttttttaattagctgggtgtggtggcgtgcacctatagtcccagctacttgggaggctgaggcaggaggattgcttgagcctaggattttggaggctgcagtgagctatgatggcaccactgtactgtactccagcctgggtgacagagtgagactctgtctcaaaaaagaaataaattaaaaaaaaaaagaactgttgaaggcaaagtttttccacaatattttgccattgtagacagtgaagcatgcttctccagtcttactctgaggctctgagttcatcagaatgattgaaagttctgctttcaaaatcaatgggaaaagtgtcatctttgatgacataagacaatgatgtagagggaatatggaattatccatcttctcactgctgggggaagccgcatgcaccacagaagtggcatgaggctttcatgatagctgctcacctcctaaagctcatccaagtgacatgctgcttgacagcctgttgcatattcaagccagaggttgcaaccaatgggggtttgctgatatgaatggcttggcttgctgagttgccaacactgaaaaattagagttttatgtgaaagtctgggtttccatcttctctagaaaaatcagagcaaatcagataaatgtggaatcattatgaatatgaataacactgctccagaatcccatgatggtgagacccaccagcattctgtgggggctggtctcctggacagggctgtgccacctccacttgcccgcggtgatcacttggcccatttccccccccttgtgaattgttgaactcaaagtttaaggtttcccttaattatagtcatttgaccttcctcacttccaagagctcaggagaaactttcccatcggcgataaagcaacattttatataaattgcaaaaattaaaccacagagccaattactgcctgagctgctcacacagtgtttcaggggacgttgaagaaagggttctgaccttgagaaatcttctcagctctggttctcaattttctgacctataagataagaaaatgaactcaaccatctccagtggctcattcctctatgataaaatatctaaccctaattgtcttggcaaagacagccccttggcatcagggaggctgttgtacaaggtctgacccacttctcattcaatttattcagaaaagcatgtgttcgtaaaaccttccttcatggccaagctggcgtgtaaacggctgctcatcgcagccagcacttaagaatactgagctcttgatatggttcaaaatgaagagagacaggcagcctgtgctctgcctgagtatctcctcctggggcaccacagtctgtccccagccccaccaaggcagcaatggggacccttgacatcaagggtagatttaaacatcaaagtcccgttgaacccaggcatgaaatttccccagatgtgttcacattcaggttacaaatgaagtggaaaaggcttaagacacatgcaaaaacctcttgacaaaaacatcagggaaatatttgtggatgaattcgaggaggtttcagaaggtcgattcttccctcaaatacgataatctagcaataatctcaccaagcaatctgcatgcttgaagatggtcacatttgttgttaagtttatgtcaatttaaggtcaaatatatgtgactgtaaatatatgaccttatgtaaggaaagtatctacacacatacgtaataaatatgcaactaacatttaattaactgattctgtgcactaagtaatttccaaaggtatactatactatcatctttgatttttttttcttttcttttctttttttttgagacggttttactcttgtcatccaggctggagtgcaatggcacaatctcggcctactgcaacctctgcctcctgggttcaagcgattctcctgcatcagactcctgagtagccgggattaaaggtgcccaccaccatgcccagctaatttttgtatttttagtagagacggggtttcaccatgttggccaggctagtctcgaactcctgacctcaggtgatctgcccacctcggcctcctaaaatcctgggattacaggcatgagccaccgtgcctggcccacctttgattctttaaagttccactttacacatcaggaaaactgaggctcgggaaggtgaaacaacccgtccaagaccacacagctaggatgggcagaaacctagcagtgctggacttttcactcggctagctgggcaccaatgctttgagtctaatgcttatgctttgggttatgacatcatccttcctctcatgctgcatggaaattaagagttccctgaaccttgttaaatcaacagataacctttctgtccacacggtgaggatggcagcattcacaacctccttttatttgaccagaggtgttcagacacatgcatgtccttgataagagtcagatacaattagagagagtgcgaaggaactggaaggagctgtggattgagagcactgtgtaatctcgacctcccgtgccttcggggctaatatgtcaaggtttccacggaccccctggacacttaaggacttgtgtgcatgcatggagtactcttcctctgtcttttggaaagccatggataaaataatgacaagagacaatgctggccacctactgtgcatgaggttgtgctctctcagccaccctacaaggctggaacttgcccctacttgacctgggctgcaaatgagaaatttacagccaggagctctcagggtctgagggagagccccgatcccagggcaggacccagaggtctgatttgtctgctctgacctgataggttctcctcactctctgaaagaaagcctgcgagagcaaactggcctttgcaccccatctgtctggaatgccctctttcccaggagcctcacctctccctgcctgtacaactcctaaggctccagggaccagctctaacttcctctccttggtgctgcagcctctgctgctctagcagagggaggagggtccttgctctgagcccctgctactcctttgaggtgccttaggcccagcaacaatgggctgtccattgctggctggtttatccccatgtgtgacagtccatttgcattgctgtaaaggaacacctgcgattgggtgatatataaagaaacgaggtttatttagctcacagttctgcagccgtgcaagcagcatggtgctggcatctgctcctggtgaggcctcaggaaacttacaatcacggtggaaggaggagagggagcaggcgagtgtcacatggagagaaaggaagcaagagagagaacctttagacaaccagctcttgtgtgaactcattacctcagagagcacaccaagccattcatgagggatccgcccccatgacccaatcagctcccaccaggccccacctccaacactgggaatcacatttcaacagagatttggaggggacacacacccaaaccatctaagcgctggaggctggagctccgtggcaagcttgtgcctggactgcagcgctaaccactagcaccgacaggcctgtcctcagcttctctctggcagcagctggcctgtggcctcctctgcctctccctgcaaccagctaatgaccccttccctctagaggcttcagggtccttcaatctgtgcccttctcccccaaagcccctcgcctgagctcacagcaggctgtcacatatgctggccttgttcaggccctagaaatggcttttggatcagtgtttctttcctgcaccttcttcaagagagctgaggctcagcagggcccaggcctggccacagggattgtcaatgattcttcagaggctattgacaaggccccacctggcaagctggcatccgaggacccaggcaggacctgagccctgctgcctcagcagccagcttcctgtaggcccctgaacacactttccaaactgaggactgattctcatcatggccatactcctgtctcccagctcctgctcccacagagcttcctgctctagaaccaagctttcttagagtctccccgccctgcctcgacccaggctggcctttgcagtggaggcagccccacccagagccagagcttcaccacctctgccaactgcaagcagcccccgccttgtgctggcaggtatggcgaaaatgggagagactgagttccagttgggaggagagagagacaggagatgaggagaacatgagctcagtaattcagcttgagtacctaacacagacatggggtgagggggctccgtaggaccatgggagcgttctgcactgacctgcataggatagggcttgaataaagttttactcgaatcacttttcccaccattgaacatggactgtatattcagctctgcaatttgcacttccatttagtatttttaaaaaaggtttccatgtcaatccacactgacccataatagagctgcttcgagcatcatcagattgggagctgcagaggggcgggggacggagctgcccctcgtgctccttcctcctttcccccaccacacactcagacacatacacagagagacatacacagacacgcacacacacacaaacacagacatgcacagagacacacacaggcacacacacacacagacacataaacacagacacacacagacacacacacagagacacacataaacacacagacacacacacaaacatacacatacacacacatacacagaggcataaaaagatacacacaaagagaaacacacacagatacacacagagagacatagacatacacagaaacacacagacaagtacagacacacacagaaagatactcacatagacacacagagggacatacacacaaagacatacagacacacacacaaagacacacacatgggcacacatacagtgcagagtttctttacagccagagttcagccagagcttgcagaaaagggggagacactgatgaccttagcggtgccaccctgtcagagtatacagggtcatgtttctctgcagtggggttgtcagtaacagctaggccctgtccctttcctggagaagcaggtgtgaaaagtcagagttaccgtgtacagccagctctgctgaggcactcaagccggcacctccacctgacccggcacagccctgtgccccagtgccggtaccatcacctgcccacaccacccttgggctgcctctccctgtgccgaagctgagtaatctatactcagaactttcctggagatgggtttacagtcacaggcatgcacaggtcgtcttttccaagtagctgtgtgtgtgtgctcctgaagacctgtgcactctcagcgacccattaggccaagagtaccaagccatgcacagcctgccaggagccgacttggtgcaaggagggagaggtggctgtttgcgtgtgagctgttagggttgggcgctgccagaaacttagaaggtcatgaagtttcatgttggagaaaccagagatcagaccttgttctactgtgtgactatggctcagctggtcaacctctctaagcctcagtttcctcatcttttacagatggggctaacaagagttgtcccataacaaatgattggcattaaggaatacagtcagtgtaaaacacgcagctttctcgtagcatcactaaatactattcatcgtgttttggtcatggagagccaccatggagctataagattttatacagagatgtggagtgtgtatgagggtacatggcaggcacatcaccctggagtgagatgtctgtgggattttgtcttgacagatgcctccatgggcattccgaagtcagaagagtaagcttcttcccagaaatggaagctgtcatttccacccaggtttcagtagcatgtgcgtcactggctgcgcctcctcatcccattttccaaggtttgaatcctactgggtggcccagcaggggccccctacagggctcagggctataaggctcttgaaattaagacgtggaggaaagggggtgttaacgaagagcgtatttcatcccagcatgtatggctggttctgaaagttcctctgaccccacccttcaaccagtggctgcgttgcgggtaccactaagctgatagtaagtatgacaggaagatacaccatcttttgtttcatattttattttctcaatactgctataaaaagataattgtcacaaaaaaaatccttcattcctttttccaggggccctctttatttgttgattttcaaattattcctttgttaagggccttttctgtatcctccttgttaattttctcttccattgttactttaatgcaccggatccttggttatcagcgggtgtgcataggatgcaaacagttctctctcatcactttcattaacttcatgaaattcttctctaagatctgtaattttactttaagcagtttgcattttgtagtcagaggtttacagcagccaacaaggagcaggaagtggagtggagaaaaacgttagtatgacaaagttggagacagacagaccagcagtaacacaggagggatgtttcagaggagactagttttataaggcccagaatatcactctattctagcttctcaaaagattaattatcagataataatgacctgtccccctacaccagatgagacttgctcctaacagaacatttaaagtttcaggtaaattatctttccaagtgctgtctttgtattagttcctggagttgatgaaggtggtcagaccagagacatttatgaagtacttacataattcttggcatgctttcaatgtttaagacttgtcatagtccccatgtattgatctaaactcaggaatgcaaaagctattctcaagggagcctggtaagagattgtgtctgctgcacaggtccagccccagcccctaaattaatcccgctcaattcaaagcctcctttcttccaagttagaagtgacaggccaggtcctctctcatacaagcagctctcaggagggctccagctgagaaacttgctgtctcatttgtttctcgaacacacgccccatggaatgcatgtgtcatttctgtagcataaggaatgtgcccgcacttcatgcctcctgtctgttcgttagttcgtaattaagtatgcacagctacagatgtgtcgcggaaagacatcatccgagtcttgacaaagaaccaaaattattcatataatttatcatcccagccatcttgaatgctaacgagaaccgtccttgattggaattgtcaagaaacatttgcacccatgtcctatcagggagcatttcctccgccagatgctgcctttcataccaacgacaaagactctctcgtgctttctccctggcctttacagaaaccaaatgcaataaaacaagcagttctcccttcccccttttctctgatgcacagttttccaaagggcttgcagttttcaggttttctggtgaggggcattgcaattgttagcttgttctttaaagcctgttgtgagagcagtaacacagatctgtctaacacatgttcctagcatcagagtccagggataggtacttagatgcaagattcttttctgctcttagatgcaagattctcttctgcccagaaggaaattcaggagtgtggaaaccactggctgtttgacccaggtccacccaaaagtgacccagttttggagaactggcttgctttggggttttgctcagatatgaggacacactcccaaatgtcatttttagaggtggtggcacatttaggagactgaagagtcagtgttctgttaccgggatgaaaaggaagaagcaatgcatttggaacatattggaaggaagagatatagctccctgggaagagccttcaatttccaagccctctttgcatccttagggacagtatcagtgcttctttgggaaaaaggagagatctgtctacttattgttttgtgcactccccaagcctgctgtatgtccatctgcaacactaacttttaattcatcaagataagtaggttttgaatgtagcattttgtcctcatattcagtgttcataagttaatctgcaaattgttgttttgattggaaaatgcattaagcacaaacccatctgattatccctgggctagaggcttggtcagacccccaggaagagggctggggtcagagaggtctgacaatgaaatctgttgcagagagctctggtgggctccagttctcagcaccagagttgtgcaaggcttggggtggtctggaaaagcttcagaaaggttaccttgtgaagtgttctaggaactctgaaagagactggatagaactgaatgttcacacaggaagtggttatctccctgtaagtgtgtattattataattggccaactttttcacttcgttacccagcaggagaaacagcatacaccaacttcactagacttttgctttcaaagactccctactcacataacccgtcaatccacctggctgtttcagaggtaacttcattgtagagatggagagcctgagactggaaggtaagaccaagatgcacaattctctctcaatttcttctttatctttcccactttcctactttcctacatcagcaggcagtggcatcacagccttatcctccctcagaacctaaatcagacttatcagatgattctgagggttcagttaaccctgaaatttccagacagaccactgctcccccatagagtatctggggtcatgggtagctctgcttttaagcattctatccctcattcactgaggtccagatattaaatcagcactcaagatagtagagagaacaggatcccaccatacccacagcaattttaagggtggcatggaaatctgcctcatggaggtctgaagtgcaaagtacatgtatgtgggagaggcagatggagacaggaatgatatgttttattaagataggaaaatgtggataaataagtgagctcactcataatcctttcccaaaggaaagtcataaggctagacaaattcatgcatgtttggtataaagcaaaaattagaaactttcttatcaaaagacaccataaaacacaaaggtaggaatatgaagccaccaactgggaaaaaatgtttgcatatatataattggcagaggattagtatataatacaaataaagaacccttaaacaggtggggcgtggtggctcacgcctgtaatcccagcactttgggaggccaaggtgagtggataatgaggtccagagatgagaccatcctggccaatgtggtgaaaccctgtctctactaaaaatacaaaaattagctgggcatggtggtgcgtgcctgcaatcccagctactggggaggcagaagaagtgcttcaaccaggtagtccaaggttgcagtgagccaagatcgcaccactgcactccagcctggtgacagagcaagactctgtctcggggaaaaaaaaaaaaaagtacccttaaacaaatgagaaaatgtcgtgggaaaatggcatgagcagtcaatttcatagaagataaaacatgaatggcccagaaacatgtaaaaagtgcttaaccaggtgggaagttaagaaaatacaataaaagacaattttactcctaccagacagggaaaactgtgaagtctgacaacttcaagtgtaggtaaggaagaagagcaacagaaattctcatgcactgatgatgggatagcatattgatacaacctccttgaaaaatcatttgttattacctagtaagttaaatatgcacctactgtctaaccaagcaattccactctttaagtatatactgtaggagtcgttcttaatgcaggcattaccacaccctagagggagtcttggaagcctgcaaatgtcacaatgagtaaagagtgctactggcatttagtaagtagagcaaggaatgctaaacatcatatggtttctggggcatttccgcctaaagatgaattagcctgcattgcacatgactacatgtgggaccacataatttatgcaagtgaatgtctgttgatacttacctgatcctgcaatctaactctaactttattttacatataaacagttaaaaaaaaaactcaaatgcattgttttcctgtctttaacatattgaatttttcaggaaggcaaccacttttctgaaaaatattccttttattgaagggatattgtgctttctgttgttattgttgtttagaactttaccaagaattgattaacattatagaaaatcatttctctgctgggaatctcgtacgtggtatttgggctatcaacccaaaacacctatgactgtttgcatttgtagctggaacaatcatggtaattctacccacaggtgcaaacatctgacattgttattctagcttctgatgtaattgttcctcaaattttacatactggtccaaccaccttttattataaattgctttgtcttatttcttttttatatcacattcagagcattacattgatttcttaaaattctgtgggtaagtgggttatagtacatgatctatagtatagatagatagcattctatctatactatagataaaatctataccatagatagcacttacccatagaatttcaagaattttatttcaagatagtaaaaagaacatcacaaaatacttgtcagaagggtggtgctggtgttgagaataataattcttttggggtatatgtaccccaaagccatgtacaaaagggttaacagcagcatgactaataaaagcaaaaaaaggcaaaaaaaaaaaaagaaaaaaaagaaaacccaaaactctgaaaacaaccaaagtaaccattaacagcaaactggataaatgcatgttatgaaatactatatagcagtgaaataaattaacagttatattcattatgatgggtaaatttctgaaagcataatatggagcaaaaacagcatattgcaaaacacatatatagagtggaaacatttaaatttcagtttcagaaatgggcatgactaaatatcctatttaggaacacacgcagtttgtgaaagctatgcagaaaattgaagaacagtgaacacaaactccagggtaatggttacctggaaggggagggatgagtctgggaggggcacatgggatgatgttttctttcttaaactggatagtaggttcacgactgctcattttattattttaaactataaaaatattacataccttttaagacagaacatatttcacaatttaaaaacttttaaaaatcagaacctcccaatctatccaagcctttagttgactggactttttaaaaatcccatcttagcttgttccaaggattggcagaaagacaaatgaaactgccaggtctcttctgggtttagtacgtactctttgtagcactatgtcctggcacctgtctggggacgtctggccaggggacactgttgatgccggaatgaatcatcatgttgatgttggaatgggtctcagcatccctgcagcctcccaaaggggctatccagcctctggacaccatgggggctagcatctgggagaattcttgcagcagaatcagaggaagggttgccgttgccatgagaatgcagtcgcatctcaggggagttctgactgagttccttggccctgagtgatccattctctacctctaatgggtcacctgtcctcctccattgcttctaatgtcaactgcacaggtgcccaggcttacagaggctccaccaacccctaaggctgcggggtggagaccaggtttggcaaggcagatatcattttatttgagggattttgactaaacgggaagagggagaagctgcatattcagaatgaaaatgagagctgataacagtgccttcagcgggctagccacttgctgggttctagaacaccgcagggatgacaattctcaacctgaagaactcaggctcccccgggatcaaatccccatgcactgcaagcttctcgccagcaggggctgtgtctccatgccctggtccctggcgctgagcttggccaattctaggtggttgcagtcttgaaggaggcacattgaagaagtagctgaaagaggaaggcagagcagatctaataaatgacaaatcggtggttcagacactgcgagcaaaacaaagacctcacgttgggttagagaggcctgaaagggtctcctgtagaagcagaactagaaagaaaggtgggtatgagacgggtgcagaaggaggggctggggtcggggacatcggggtgtggaaatagagaagaaagactaggaggtgggcagacacggggagctgccaggcatgaggggcaggcagctcttgcagtcgatgggtgacatgttggctactgccacatcttgggggccttagatgctgcactgagggtccccggtgtagttttgcaggcaacaaggagttgtaaacgatgtttttgtgtcccgtccctggcccagctcagacttcagctgcaactctcctgccagggtcagctcccacctcaagcaccttctgaatttctgtacttttcctccctgggcccttccccatctctgtggagctccctctgctgcttccagcaaaacccagaagtgcagcagagtttttggcctgggtgggaacacatgcccaggccccatgctgcagagtgggcatgtcctaggcacggaggagcaggttttcagaggcagctcacagaactgagccccagtggccgcaggggtgctggctccagaaggcacgctggtgggacattctcccctttccagtaggctgcctgctccctcactctgccccacctctcaggtcctggcctctggcctaggtttcagggaaacccgcaagggaggaggggccttggacatccaggggagggaggctcctggagatgtagccaacagagatgaaactgtgaggagagaaggacagtcagaggccgccaagggctgtgatgcgggcagggcaggaggcagttgaggttagagacagacacagccagacagagacagggagacagagagagacagagacaagatagagaaacagagagagactgccagagacagggccagacagtgagaagacagagacagacagagagagggacagatggacagagagaggcagagacagggaaagatagatccaaagtgacagaaacagaggaagacagagactgggacagacaaatagaagacagagagacagagagtaacagacggccagagagagacagagacagagagagtgacagagggccagagagaggcagacacaaggaaagatagaccaaaagagattgaaacagagaaacagagactgggacagacaatgagaagacgagagacagagacacagagagaaagaaagagatggagagacagagacagagagtgacagacagacagagagtgacagagagacagccagaagagagacagagaaacagacagaaagaggcagagacgagaaagagaaacatggagagacagagaaacagagagcaacagagacaaagagacagacagagacagggacagacagtgaggagacagggagagacaagcacacagagagaggtgccaagcaggctggagctctggagcttccagaggcctgggcaggttcagctctggagagacactgcagcttccctggcgaggcagggctgtgggcactgggctgtccattgtagggtggcagtgctggttctgcctgtggggtggctccagcctggctcctgggatggtggcagccccaggggactgcctcattctgccacctgcccattccctggctctccttcacctttgtccctcaccggcagcagaagcacagatggctgttccgtcatccagcacgtgctgcggtgcatgtcacagggcaaggtgctgagcagctgtctggtccccaacacctggtgacaccttcacaagcacataaatcacactcatcttgaccaacacaaacacattcacatgggacagatactaatgttaatgtttaacctggaaagagccatacccagcgcaatcggtggtgctcaggtcctggaatgaggcagccacggggaaccctggtgcacagggacctaaatggaatcactagtgagtggtgaccacggtccaccccgtctctcactcccctgatttcacaccctaggcaaggcactgagcctgggtttcctcttctgtggactgggaacagcccagaaaattgctgtgggcctctagaggggtcatgcatgggacacagtgagcctgggcctgccgcacagacatgccccgtggaaggtggcttttctggcggctcaggctcaaccatacccctgctgccttggcaggctttctcagttctgcgtagctgtccaacactccgaccactgtatgcggctcagtctccacttctgtgagatgctctgtgacctggtaggaccggccacccctccgagccccacacgctgccctgtaccgaagctttgttgcatacaattgcaaatctgtaaatgtcactgtgtccagtgggccttcattgactggccctgtgtgatattttattttgccctggttcattttcttcagaacctttattacgacttgcaatgagctactttttttttttctccatctctggtactagatgctgactccagggtggtggccgggaggttctttgttttagttccagatctccagaaacagacctgagacaaaaatctgggtgcacccaagacagaaatcttgggtgggaggtgatcccaggaggcctgtgagggagcaggaaaccaggtgggaggagagagaccagggtcccaccgtgggtaccaggactcatctgctcaggagagaggctgtgtgagacacacctccaaggtgtcctactccagaggtgaggaagccagtatttatttaccaggccccggattatctcagcatctggacatctgtgccaggtgggcacctgcccctcccctgaggggatgccttcccacccctcctcactccggcctccacggatcttctcacttctcttggggtgacgatactattgtgtctgccttccagtctcttttggtctctgggcacacagctcaggagtggctcctgaggacaggccccgcacccggggaggggaggcagatgccgcactcaaagacctgtccccaagaagtgctccatgaacaggatttggggaaaaaaataaactccagggtgacaagagctagaagaaggattgaggactattccatggggtcacctagatctgggggtgggagaagcaaggaaggcgtctccaaggaggggcaagggcctgggtgtgaaatcacacaggatctgtccccacatgaaggagaaggagacagggagatgcggctggaggaacaacatggatggagtctgtggggccagggggaacaaggcatatccaaggacagctagagggtgcagtggggggcctggagggagggaggcagcaggagctcggtggggccttggccacagtctaggtacttgggatcaggcctgtggttgcctgtgagctgctgaggaaccttacctggtaggtgatgtgataggaaatgcttgatttaagacgttgatctgtttggcagcctttggaaggagggcgggagggcgcgtgaagggacacagatgccccagccacggggtggcaggtagatttaggtgagaggtgggaggtccttgtctgaagccatcttggggatggagaggagagaggcaaatgtggacactcagccctgggcccaagaagatgttccactctacatggagagacagggtaaggagaggtaattcccggctgagggggcaccgagcaagggcatggaggtgggagagcccaggaatggcgggagccttctgctgtgctgccgagtgtggtcacgatgaagactgacatccggagtgtttagaaaccaccgcagccatttgacagagtcatggagtatgactgttcaatccaataacatgaaattgggggcttgtattttgtatggcttttcttttaatttcatttttctcataattcaagttttattgaattctgcaaaaatattggcccgtgactgatgggaaacaaaacacctggtctttctctgcagctggtgggggttggggtgggaggcgcgggttgaagtgccctccccatcagctcccataactctgcctcatcccagagttttattttttcttcatgccagaaaagtccctccccacactgatgccagcaagccaagcaggatgtccccacccccaacgctctgtccccagattctcctagccccaaagacatatcttagctcagatgaggtagagaccccctcaccccagctcaggctgaaagcgaatattgttcagtctcttatccctggggccaagcccgtgtaggaggattgtgtggtgaccgcagctggcggctcccaacctccagtccctgctgtcggcggccaaggccttggaggtcattaatgtggatcggcactaatggattctctgtgctggctttgtcccccagcgctatttttaactcattttggactttgaattgtccaaatgcattttgatgtgtttgtgagaaaggacataaataaacccttgagtgttgtttctgtgcagctcctcagaaaccaacttctcatggctctatttgctttgctgagagctgagcatttcctgcaacttaccaagatgggctgaggcctgcccagcttccagagtggcacctccacatgtactcatttcagtgccactaaccaaagcagtgcccattctcctggtagagtttcagggggaccccctctcacccctgatcaaagagcatggcagcccagtagctgagtacctcctgtgtacaggcacctgggagcttacgatggggcaggcactgtgggaaaagcaaaatcagaggccgacagtcccgtctccaagatccttcagtgaactgcggtgactgtgaacacacaggaaaccaagaggtacacgcccacaggccaacccctggtttggggacagccaggcatttatgaacacattcttcaggcagtgtttggcctgaatacatgtgctgagtccctgcctgttatctgaagcctgctcaaaggcagctaagatggaagatgtggcaggtggctgtgcaggcagcatatgccacaagccacagctgtctctttgacagtggccagggcttccttatatgagcagttccctaagtcactcaggtctggaggccagggattctggccatgcttctcatcttggccgggcccccagtgcagcgtgggcctaaaccatgttctggattcctttaaacacctcctgagcgcttggtgtgctcaggacttgagccagccttggggtcactgagggagtagagtccagcttgtgtctgggaaggtctcctgttggcagaggagaaggtcctgagctgtggacaccagtacagggccgtggtccagcctttggtgctgcaaagaaccccacctaagtcactcagacatgacactgtcttgaagacggagaatgaggaatggagccagcctcaaatgtaggagaggcgctaactcaatatctccaatcagaagaaatcagaaggttccttatttcaaaaatctctacacatcaaatgccgtgattggcccaatggctcaccagtcttcagatcaagtgtagcctgagtgttcttttaaagtgtggctttctagtatagagaatctccatgtcccatcacattggtttggatgtgtttatcaggctcattcatctctcatgagaacgtgtagagtttaaaaatctctaaagaaatccctggacgtaagctggtgtcttgggcttgggtagtaccagataaaacgaaaacacagacagatttaacatgcttaggggcaagcatttccaggacttggggatttattgggttgggagtgagagggaggaagacactgactatgattcctggcttccatcctgggccccctgcaaatggtgattatgaagatggtgggttggataggaggttctgagttccactttcagcatgctcactctaagtggctgagacgatggccagtgaagagtgttgggtctagaagcctgaagctacaggtccggctatggagctggatttggatgtggttggcacagagaggacacgaggccatgggagtaaagaaaatctgcagagtgcgaccagtataaacagagccgcatgcattttgccctggaaattctccttctaaaaatgtattccaaggaaatcatcagaaatgtgcaggaggggaggcttaaggataatcatggcagagttatttgtgcttataaaaactggaagtacccaaaatttccaacaagaagggcaaagttggattttgttccaaagcatggaatacaacctagccacaattacatcggtccatcgtggtgtggaatgctcaagtgctgggaggagcaagccagttccaggaatgcacaggaggcaatgggtttgtgtaggcatgtgtgcatactcacacagaaaacatcctggaaggttacacactgaaatgttagttccgatgatctgtgagtggtaaatttcaagatgaattgggattttctcattttcttctttcctatatatttttttctttacattgattctgagcctcttttaatgaggaaaaaaaatgttttgggtaaagcctcccttttggttcactagagacagcaccacagcagagctgggaacagttgtttaaacatccccctccctgactttaccttgggtaaatgggcctctgaagaaattccactgagaggccccctgccctcacattacattgtcaatttcatcctgagcactctgcgtaaataccattccagagcattaggtcgcagccattagcatggcagttatgtgccagcttttcctctcagtttacagcccttatcatctgcaactctgctttaagaacttaaaattatggtccgaccgtagcctacataaacattcaagaaagtcttaccatttggagagctgtaaaatgaatctgacagtgtgacactcacgtgcagcttcataaagtgcatgctaacgaatcagctgtcctgtcttcccagaagcccccagagcttccaggagccaatgtctccttggagcaatgctcaggagccattgaggccaggcacaagcacagcctgcacagccactcatgctgcttttcttgggatggaaaaccagggccttttctggactctaacagcatcgagttatagctcaaaagttgctcaaagtatcctctgccttaatgatcccagtatctaaactgaagcttcctaaacttcccaaattaaagacccttcccattgccacctgccaccagcagcactgatgaaatgccctctggcactgaaaccatcggtgtttggcataaacacaatgaaattcttgtttgcctccaaagtgtcttataaaagcttatccctcttagaccatggtcccattctcctgacaatgtagatggtacaaaaagcagccatccatcccgaggggctggcccagatcacacatcatggatggcctgtggttctgatccagcctgcagtggcaccattgcatatttacattttggatttttactaatttatttatttatctgttttttcgagacaggatcacccttggttgcccaggttggagtgcagtggcattattatcacagctcattgcagcctccaactcttgagctcaaatgatcctcccacctcaggctcctaagtagctgggacttacaagcacgtgccaccatgcctggctaattaaaaaaaaattttttttgtagagacagggtctcactatgttgtccaggctggtcttgaactcctgagcaaaagcaaaagcaaaagcaaatgcctgggcctcctaaagctctgaaattacaggcgtgagccaccacacctgacccttcaccaacatttttaaaacttagagatttcacagaaaaaccacaacattcattctcttgagaaaattgagaagatgtgaaacactgggcactttcgcagctgctgcaccttttagacaaagcatatgcttcccttcgactgctgtgcaatggaccaaatgcttgtgccacacccacccccccacccaaagttcacatgctgaaatcctaactcccaaggtgatgacattggagctgcggccttcagtagataagcaggtcatgggggtgtgaaacctcataaatgggattagcgcccttacaaaagagacccccgcccccacctaaagagctccctccctgtcttcctgccatgtgaagatgcaacaagaaatcagctgcctgcaacccgaaagagggccctcaccaaaacctgagcacgctggcaccctgaccttggacttgtagcctccagagctgcgagaaataatggttgcttgttagagccactcagggtatggcactttgctgtagcagcccgaactgaccaggataccctgcctacctggcccatttcagccctgaactgaccaggatgccccgcctacgcgcccgtttcagcccggaactgaccaggatgccccgcctacgcggcccgtttcagcccggaactgaccaggatgccccgcctacgtggcccgtttcagccctgaactgaccaggatgacccgcctacgcggccgtttcagccctgaactgacgaggatgccccgcctacgcggcccatttcagccctgaactgaccaggatgacccacctacgcgggcggcccgtttcagccctgaactgacgaggatgccccgcctgccccgcatatttcaaccctgaactgaccaggatgccccgcctactcggcccgtttcagccctgaactgaccaggaggccccgcctgcctgaactgtttcagtcctgaactgcctggactgtttcagccctgaactgaccaggacgcaccgcctgcctggactgtttcagtcctgattgatgcctgtgcagctttgggaggcatgaccgcacctcctcctccctacacaccccagtgggggaagaggagagaaaatacgcctcttccctggctcttcgctggagtcttagtgatttggtggagatttccaaggacaggcctccgggagctcagcgccgccctcctgttactgggcagttaggtgtgggaaggaacatactgacaacccatttttcttcaggaaaatcccattcaccacccttgaccttatattgctcagcccaggggtgtacatgggggaagtggtagtcacagggacagtaaggcaagcccagtctgtgtctaatgactatttcttcttcagatagttgagaatttaaatgtgaatgcaaatgttacgcaaatgaaattactcctaagacaatttacacagaccaactattagatcagaacctcctgtttaacacagcctgcccaaaataactgagactattccgatcttttgggcaaggatgtcgacacactgccagtgcctctggagttaaagtggagcgctgtctttgggattgggagccagctctggatatgaacacggctatctggcaggctttggcctgccggagagaaatgtgtcttgtcccatgagaaagacatccccaggctcacctgaggagccagaattgctggtgagggcccaggtgtctctaaattgattgctgcctctgatagactattctaagccacggccatctcgtggagaaattaaacattctgtgtgaaggacatgcatgtccttaacagaacagtgaagttgctgatgcatttttattctcagccaccctcacggcaccccagtacctaccccatgtcccagcctcatggggccttgctctcatctgcccattagctaatctgggctaagaagatgtactgcacaaaaagaaagaaggaattcaggcttttaaatgaaatgcccaatttgtaactgttggctaccaatgcaattagttagaaggtagttctcagacaggtgggacagttcttctcctaacaagcatgtgtcaaagcatgcttgtttcttctaacgttttgtttttctaaaaaagtgtgctttcttcttctaagaaaatctggcaaataaaatgttattctcctcatgttaactggaagagtcccttgcctccaaatcaattctatccccaaatgttgaaagacttgaaattccacgagtagatcaagggcatccccctgaggcctttactatgggaacagacctcacccccgctgctgtggtaactgtagggacccgcttcactcatgctgtcccttggcttctgtagacacttgagtctgcagcctcagaacagggctgatctcaaactgggcctcagtttgaggggtttcacccacgagtgactggaggccagcactgaaggctactgtgcaggactgcactctgtcacaggatagacctgctacatccagaggcatcccacccctgttcatctcatcctgggcactgtttctgctcagttctcaatggcaggcttttggccctctgaagtcagagaaccaaacccactgagaatttatttcttctcattagagatttctggattccataaataattaattcagaaggaagacacacactcttctcaaatgggaggttaaaatcagggaggactccttcccaagcttctaggtccatctgttgccatcagtggagatgatttggaaactgctttcaccctgattctggggacttgagccatgcagtcatccctctagaaaagactgcagggcaagttagagaccccatatagagtgtgtgatggtcaattttgtatgtcaatttgactaggataagggatgcccaaagagctggtggaaacttatttctgggtcctttctttctttcttttttctttctttctttctttctttctttctttctttctttctttctttccttccttccttccttccttccttccttccttccttccttccttccttccttctttctttctttctttctttctttctttctttctttctttctttctttctttctttctctccttctctccttctctccttctctccttctctctttctttcgatgcagttttgctcctattgcccaggctggagtgcaatggctcaatctcagctcactgcaacctccacctcccaggttcaagtgattctcctgcctcagcctcccgagtagctgggactacaggtatgcaccaccatgcccggctaatcttgtatttttaatagagatggggtttctccatgttggtcaggctggtcttgaactcctgacctcaggtgatctgcccgtcttggcctcccaaagtgctgggattagaggcgtgagccaccgtgcccggccatttctgggtatctctatgcaggtgtttccagaagagattagccttagaatcaggagactgagtaaagatctgccctcaccaaggtgggctgacatcatccaatcattgagggcccagatagagcaaaaaagcaaaggaagagtgaattctctctcttcttgagcttaggcctccatcttttcttgcccttagacattggagcttcaggttcttgggcctttggattccaggacttacgacagtgccccttggttctcaggcctttggtctcaaagtgggagttgcaccattggctcccccagttctcagggctttggactcagactgaactttaccaccagccctcctggttctgctgtttgcagatggcttatggtgggacttcctggccttcataatcatgtcagcaaattcccaacataaatctctccttatatatataactctagctatccatccatccatctattcattcattcatccattcatccacacatctacctacctatctgtctacacatatttatcttacttgttctgtttctctgaggaattctgactgatatagaggaattcactgggatcacaagccaggcttttaaagaaccactgggcctgggctgcttctgactctgaatactccatgttataagatagcaataataatacctactttagtttgactctgtgaccattagatgaggtaacatcttataaagctctgctcttaataaacaacatctgcaactgttgttgttgctgctgttatttttatatcagtcaaggttttttaattgcaagcaacagaaatcaactctggctagcttaagcaaaagtgaaatttaatgggaagatattacagaatgcatcaaatcaaaggaacaccgagacagagacatgcaagaaacagaaacaggggccactccagggacccaggcaggcggggctaattggcagctcatcaaccctaaccattctattcatccttgcctcatgtaccttgagagtcgaagtcccaagaaagaagccaactgggctgtcttttgtcacattcctattccttgcctaatgcagtgagagtggcagggtgccctggttgacaattgcagccagcctgcatgcaacagagcagagggaaccaaagggaaccagggatccttttaccagaagaaggtatggctgccacacaaaataagcacatctgatgcaaaccatctttgacatgtgcagaagcttactgtcctctgttcttggtatgactggatgatgtaggcagagcagccagaggcatgaccgtcagctttcattcctcaagaatgggatttttcttgtgcacttctcttttcttatgcatagtcctcaatcaccttggccccagagcctgcccagccagacttagcaggactgggtcacccagttccccgtggcagaaatgtcacagtcattcaggagcatccacatttgggctgggatgacaacacaaatcctgcagtaatttaacacctgctctgcttttatgctgttattaaagagttttagcttaaatatttgaggtgtgactctgctccctcatgcaaatacgggtgcagaatttcccacctggctcattgattggtgggatctgaaatagcccctttatggaaaatggtaaatttcttattactgcctaatgaataaagtgcatatgatccagctgcagcagctccccactcccctctccttcccagggaaactcatcccattggtaattgggggaatgtaaatgctgcttcatggcttaattttcagatgttttgaaagacaatatctgcagcaataaaaggctcaaagacatctgagatatgttttgtctcttgtcctaattatactaataaataaatagtatttgtttccctgcactgtaaaattaaatatctttctgaatatctcccctcctattttaatgaggagaaagatgctcccttgatgagaatgacactgtagatgaaaaacgagaaagaacaaagaatgttaaccatctaaatacaataacatgagaagaactgtttcctaagttctgagtatgatctctgggtgggatattctccttctcatcctctttgtctggagaaaatgtctctcaaatgtatgctgtttgggatctctgtaaatttgagtcctcaagggaattactgttgccttacctacagatggcaccttgtggggtatcctcgaacactgccaagccttggcacccaggaaccaaatctccttgtaacttctgcggaaattgtgagaacagggatctttccatcttactttccaccgtcacctgagtgcctaaagcagtgctcagcctgtaacgggtgcccagctatgtcacatttgtttcaggagcactcctgtggccctgccaagtctcatgttcaagttggatcccagcgttgggagtggtgcctgacgggaggtatctgggtcatggctgtggataccccacgtgtggcttggtgtgattctcactcttagttcctgtgagaagtggtcgctgaaaagagcctggcacctctcctttcttgctctcttgctctgtgatctctgcaaatgtcggctcccccttcaccttcccctctgagtggaagcttcctaaggccacaccagaaacagatgctggcaccatgcttcctgtacagcctgcagaaccatgagccaaatcaacctcttttctttataaattacccagtttcaggtattcctttataggaacatggactgagacaagcacagatcccaggaactgggcagatatctgttttccataggctgatggttgaggtcgcagctctgcccctcactgaccggcaggtttgcagcaagcctcattctccatctgttaaatggggatagtcccaaagaaagacagctgtgactgaattatttttattaaattgtctgcccagacctcagtctctccaaccacgaaagagggatgtaagatgagataaccatgaaagtccattgacctcggacacggtgacactaaataaaatgttcttagtacgctgactcagaaactcctcaaactaactgccaaagtgcatgggctgatccccctgcccccatgatgctgctggctggagggctgtcctgaagtccagtgggcagccaaggccacgcctgtgcctgcaccactgccggccctgccctaccactcctctctggactcatgtccatatcacagctgattgtgaaatccagctccagcatgttgtatttgaggagcttatttctcactaaccacatttggcccacaggcaaggcaattaagggtgttcatccatttactaaccccccaccaccccctgcagtgccccgagagtgggaaggtggcagagctgctatgcttcagagcaggttccctgtttccacttcagagcccacttggcactgcttgaaacgccctggatgtttgttatgaaagattattgggaagcagtgtgactgggcatgctgcactgcttacaacagaatgggaatgcacgctgcctgccgctgagtgggagagccccacccagctctgaggcaagtgtgactcacagctccctggcctctccgatcccatggagctgaggccactgggccttggtgaatgttatataatgtctcacatggaagaacatgcctaccgccaagggcaggggttctaagtcccagggccagacagggacagggtggtccacacccctgcctccatgctgctgctttctgaaaacataggctgcagaggctagcatgtctctcaagtctggaatcttgggtgggcatctccaaatgttcctcttcctactcaacaggtccagaactggccttcagattcccagtaagaggatgtgtgaggctcttgcaggagtttgcagctacctgtgaattatcatgtcaagaagcaaatttgtcatccactcttgtgctttgctgagccctatcctggtgtttgactcagatgctgctgtccgcagaaactggcccatctgttgaaactggcccaattttcccatagaactgatgtttgtgggttttttgaataaatgtagaagttgaccctcccagtcttcaagcttgagaaatttacatttgtccgatttcctttttcaggaagctgaccatcaggctttccaggtagtgtcagggagctaaagctttccagataattgtatccaggtggtgaggccacctgctgcctgttatcagctcctgtttaaatgaacccctgacaatagtcacttagggagatggatttgagacttgtctcccatcttctggctggtgtcacccacaacaaagcctttcttccctggcaatactgattgtttcagtgattggctttctgtgcagcaagtaactggatctaggctgaatcctaggtgtgcagcaacaatatgggagccaagaaagcccccttcaagccaggtgtgacttagcagctccttctctttgtggcactgtctctgcacttctctgtctttctccatccttttgaagaaaagggggaataaataccaagagaatcacaaccactgcctccctgcaggagattcatccccctacctcctacctgaaggtgtttgcatggagcatgcggtggggagagctctttcctgcccatatgaccccttgttcttagaatcctggagatgattcaatgaactttctgtttccagtgataaaactcaaaataaacagaattaagtgaaaaattgggcattggcccccagtaaaaacactgtatctcctttcactcctgtctccctgaaggccatcttctctcagcttctccctttatgaagtctccatcagccctctaccctcgttccagaattgagtttcttcttgtctggtatgtttacagccccaggcgtggcttacttcccctgtcattttccactgttggctagagaagggatagcatgaccttctagtctgtgttgcagtctgccttatttcttgttttcttcaactgttccagagcatctaaagtaaacgagtcacattttatactgcaaaagacaatctgcagaagccctcattggtgcatgggaagaaaattatgtcattgggttgacataaaatattcctgtccttatgggtctttcatgtttctgcatgtcttgtgagcagagggactggctgcctttgttcagaacaatcttaaaaagaatcactgtatagtgaacagccttggaaggtaaagagaatgtctccctctagagcaaaggctaggtttgcttactgcccaacataaaagatccaggttctcaaagctcagagctcctctcctgcaacacgtccactgagtgtgcagatgtcacctggcttttccatcaccatgtgggagtcagggctcaagaaactagcacaagaaaatgttgatacttgggctattgctatttctgtgagtaataaagttctttgtctctgacctaggagtcttttgtcctctgccaatgtccatgaaattgtggcaggctaattgtgatgttgtaaaatatatatttggtctttgacaccatttcctggcatacaactcctaaattccttggactcttccaagtgatgtcttcttgtatgctaatgaattggctgatggctgagagctcctatatagcttcaagagagaagctggtcatcagaaagaccaaggcaggattagagtgttgggactccaggaagtggggaggtgctgaaggttaagttgatcaccaatgaccagtggtttaggcaatcatgcttatgtaatgaagcccctgtaaaaacccataagaacagagttcctctcctagttcctggaaaacttccagatagacaaacacacagaggttcctgcaggatggtgcaccccaggtagggcatggaagctctccatccctttccccataccttaccctacacatttcttcatctgtatcctttgaaatattctttataataaactggtaaatgtaagtaagtgttcctctgagttctgtgaaccattctagcagattaattgaacccaaagaggaggtcttgggaacccccaacttgaagccaattggtcagaagttggggtttccaaggtcccctctttgggttcaattaacctgctagactggctcacagaatgcagataaacactaatttacatttaccagactttctactagtgcctgaagtagggtgggatggtcttttgggactgagccctcaacctgtgggatctgatgttatctccagttagacagtgtcagaattgaattggaagacacccagctggtgtctgatgcagaattgattgcttgcttggtgcatgggaataaaaaaatgcaacatttttccactgaattcttctgtgttgattgtcattgagtgcaagaatgtgaaaaactttgtgttttttctactcactaacttatcttgcaagtaaggtaaaatctcattaccttcagagttcctgacaattctctctgctaatgtaattttggctgtacaatgctaaaagcacatttgtcctctgcccaatcttaggttatagaatctaacataaatgatgacttgcccaaccagttcacctaactgggttctgcttccagggtaataagtaaagggtagttcctatacagacatcttacatttcttgttaaagtgagtctttgtttggtccttccaaatggctcctggaatggtttatatctgtccttaccaaatctcatgttgagctgtgatcctcagtgttggaggtgggccctggtggcaggtgattagatcatgggggtggttcttcataaatagtttagcaccatcctcttggtgctgttctcgtgatagtgagtgagtgatcgcaagatctggttgtttaaaagtgtgtggcaccttccccatctctcccttcctgctgctctggccatgtgaagtgctggctgtccttcaccttctgccatgattgtgagcttcctgaggctcccctagaagctgagcagatgccagcatcatgcttcctgtacagcctgcagaactgtgagcccattgaacttcttttctcataaattacccattctcaggtatttctttagagcagggtgagaacaaactagtacagttcctaccgtgagacctgccagtactgaggagagaaaggtgttccatatgcatttgcatctggctttgccgttaaacagcaccctttccagatctccagagaccaggtggtaggaaaaacagaaggttgagatagagggttccaaacactctctgatggatggcattgcaacttgtcccctgtgagaccctcacaaatagctggcatgcccatggcctcccccaacagttaccattcctcactgcactccaagtctctccatagccacccccacaaccattgccaggtaggctcactgggtgtatgcccgaagtttccatgtttaagatcaattccagaaggtctctccatgaaagagtggccccagcccctccaccaccaggcatggtcatctccccagggctctgtctgaaagagctttctggtaatgcagttgacttacagaacagtaggatgtgggacagtgaagtttcaatagaatgaaaggtcttgagtaaaagcaatgccctgtctggagcagcaggtctggaaaccaggagcagggatagctgagatgcagaaaaacccagaagatgaaacgggagaacttctaagctgtcaggttcaaaaatgtccctaagccttttgtgtcctgctctcctccctgaagacatgtgaagacacaggaatacacgtgtcttctcctcccctcttacgtgaagacacgtaggaacagtatctaactgaggcactcacacgatggtcatcttcaaataaggaatggacttttctgggccctctcacagccgcctccagcacttgacttcccaaccccgttctgagctcctgtgccggagagtctgggctaggtcagcggggtgggagaggcatcaaagcagagatgagtacacaggcacactgcacggagcaagaggcgttatagtgtgatacagcaagaggctgtggaaggagcagagaatgagtcctaggagggaggtagagaaatcagggaaggctgcacaagggatgtagcacttgagctgatcctgaagtagaaggagaagcccctgctgggtgaagagtacccatcttacagaagtgtgggagccaaactttcacctgcaggagaaggcacttctcacctgagcttaggccaggggactccctgctctgaggccacactcctgacagtggtcacatctctgtccgacagctatcttttgaatgtccactaagtgccagccactgagccagacaccggggattttatacattatcaagtccctgctgccactgagaagatagacaaacaagtaaaaaaatcataattttgggttggaatcagtttgtggaggatataataaaacagggtgatgtggctaagagcctttgggtcacagagagggcttctctgaggaggaggtctctgaacatagacctgaatcaatgtgaagaagccagctgtggctctggggaacaatgagtcctggcccaaatgtaggcacagctgtcccaagaccggcatgtctgaaaaacagtaagcacacacgcacacacaagcatgcacatgcacacattcacatacatgcatgaacatgcacacacgtgtgcatgcatgcacacgtacacacatgcacatactcatacaacgcacatatacacttatgcatatacacatgcacacacatatgcacacacacatgcacatgcacacacatgcacatacacatacacatgcacacacggacacgtacacacatgcacatgcacacacatgcacatacacatacacatgcacacacggacacgtacacacatgcacatatacaatgcacaaacacatttatgcaatacacatgtacacacacttgcacacacacatgcacacacatgcatgtacacatacaatgcacatacacacttatgcacacacacatgcacatgcatatgcaaagcgcacacacatacatgcacacatgcacacacatgcactacacgtgtacacacatgcacatacacacaatgcacatacacacttatgcacacacacgcactgtcctatggggctggagcagatgggggagaggtgggagatgacgtcagaggtgcgtgtctgacagggtctggagagcactttgaaaacataaagagagacaggaaggacttgactgtgaacccactgctttggctgctcagagggcaaactgtagggtctagggtatccctgtgctcacagaaggaggccttacccagtggactctccccttctcttcagattcatccaaagctggaacagccctggaatctcagagaatcaggatcttctgtctccagagaagaggggagctctggcccccttgtagggaagcagcttctggactctcctgtctccctgcagccaacaaccttcttcccagcaacccccgacatacacccctgccaccctcagtggttcccgacattgatgctggtgagggtgagtgcttcacccagtcctcagtgacccgcaggctccactaagaggtccagaggggccctgatccatagggaagaaagcagaggggccccgacacagctccacggtgctgcaggcagggctctcagtgcctctcagtgcaggcttctgggaaacagactacccctcaacaattctagtcacattcccttcctccataaatggggccagtgggatatggagaaaatttgtctggtttaactaggattaccctgaataaaccattttcctcgtcttgatttaccattgagaagctgggccctgatgaggctgtgtgaattacgattagcgtcctgccctgcctggggtttaattaattcgtggggctggatgcctggatagctcagggcactccctgatgcttggggctagcaggcagaggcgcccagcgcaagtgcagctcactgaagcttccgcactgggcttggcaacggagtgttaccttctcattagggaaatggggagtggagccctccagaggctcccaccccctggactcctggttcctagcccccagtccatagtccagcagctctcctggtgtggaggacagggacttctccattccatccctttcaatctccttcacagcaggaaggattcctaagtagcatgattaattagtcactggagcaagggagggaacagagagagacctgtagaggtcagaatttgaagagcccgtggaacccagaaccaatcactgttcatccccacctccctgacccccttggtcctcctcctccttcccagccctccgcaggctcccctcacattgactgtctccactcgacttcagggttccctgagcctcttagggaaaggacgttggaacattagaagggccttggaggatgggaagtgaggtgagtgaccccaactgtctggtgcatgctgttcactagctacatgtattttgtttgaactctagaattttgcaatttgtgcaacttgaaaaaagaagagttcccgtagaaatcaggatttctggaaaatctgaaaatgttgccacattgggcccgcattccctcctggtagcagactggattaaacagggctgcctgacctgtgtagccactatggcctgcacgccttgctcacctgaccagctccgcccctgaacacacctgtgtcagggaagctcaccttctagacaggggctgggcctgagaggtacccagaagccaggaacgcaggaacagagcacaagacctgctcaggaagccacaaaggcgctccccaccttggggaagagtcactgctaaccaacagtgggagcggtgtgttgctggctttctgcaactgggctgagagggaggcatcccaggcaggagaaacagctggaaccaaggcctaggggaggaaaagctggggaattttaatgccagctaagttgatgttaaatcctggtgacaggccaagcgtggtagcttatgtctataatcccaacagtttggaaggctgaggtaggcagatcacttgagcccaggagttcaagaccagccctggcaacatagcaagtccccatctctacaaaacaaaaaaattagccagatgtggtggtgcaagcctgtagtcctagctgtttgggagactgaagcgggaggacatcttgagcccaagaagtcgagactacagtgattgcaacactgcactccagcccgaatgacaaagcaaaactctgtctaaaaataaacaaatacatacatacatacatacatacatacatacatacataagtcctggtgacagagaagttctcaaaactccttcttggacacattttacaatgtttgtaacatcatagacatcctccatttgacatggctcaagcagcctctgctgtgaagtggcatctggaccagaaacagcatcatatcaccacacatggatgtctgatgtcttcttttgccttaagaaccctggtttctgtcatgaggtcaacctgtcgaggaaggaggcaccatctgccctcagcaatgctgggggctgccaggggatgcgggcagtcagcacagttctttttttttttttttttaaagtctcgctctgttacccaggctggagcacaatggcacaatctcagctgactgcaacctttgcctcctgggttcaagtgattctcctgcctcagcctcctaagtagctgggattataggcgtgggccaccatgcccagctaatttttgtatttttagtagagatggtgtttgccatgttggccaggctgttctcgaactcctgacctcaagtgatctgcccacctcggcttcccaaagtgctgggattacaggtgtgagccactgtgcccggcaatggcacagttaattctccagaaagtttcccttgcatattctgcatgtattgggggtgcatatgtcccagaagtaatagtgacaagcaggtctgtgcctccacgaccaagctgggctcacagcccaatgagaccttggttctctctgctccctccttgctcgcgtgcctatagttagatggaaactcgacctccgtctgccagggaggcccagccaatggccaaccagcaggtctgtggccctgacacagacatttatgtccctgcaatcctcagaggcttcgtgcattattcagcacagttcccccagccatgccctggccctgtgcagtctccagagggtttccagagcaacatattttggagctgaattacaagatcagacagttggggaaattcctgctttaacacaacacctctgagataaaatttaatggtggaagaaatacggtattttgaaaacatgaaaataaacattctgcagaaccgggatacgaagtcgcacagtacagcctgtgaaagcctctctgtcacagaagaggtctaataatttttaatagtcctgtaaatctcccttatgagatgcagctactgtaaacacttctccataattttttcaagtatttatgtagtgctgttagaagttattaaacgcgaatgattttcattgataactctcattctgaaggtgctgccaaccagctcaacctaaagatggtaaaagggaaagtgtcccccacagggtcaacttgggctgctcctgggatcttctttctgaactaaaggcagtctgggaccattctgaacttgcctggtgatcggtggcaaactcattcactcccccactgccatctcccacgttatgaaatgagaagaaatcattcctgcagttcatttatcatttttgcatgtattagcgtgctggcaggcattttacaaggccctgggaatagaacggcaagaaaaagagacaccattcctaccttcatggagcttgtggttccaaggcaaacaggcatgaatcaagggattacagaagacggtgtaaaattgtaaatgtggaattattgtaaagggaagctaacacaggtcatgggttgggggagcatcacagggagatgcccagtcttcaaggtctgagaaagcgtcctcttggcagaaacccttgtgttgacacctatgagatctgtaagactagaagaggccaaataggccaaaaggggagaaaaacaatggaagcaggaggagcaccagcaaggccaatgtgtgggaagaggagtaagacatgttggaagtgagaaaaggctgggtggctgggaaaaacgtctgatgggaaacatggtcggagaggagcctggggaggaagaaaagagccccgccaaggagggccttgtaggacaactggtgtgtcttcatcccactgtcaggggagggcctttggagggtttgcagcagagtagggaggggtgctatagatgagtgtgcttttgaagcgatcactccagctgcaatgtgatacaaagacaagggggttccgagtatcaacagatggaccagcaaggattctgctgcatgcctgagacagcagtgaattgaggagggatgaagaggggtcaagggtggggcggggtggtcctcaggcttctagactgtaccatttaatgaagtgtggcaccattcactgaaatggaaacatggcagaatatcagggttgtggggtgaaggtcatgagcttgtttttggaccactgagtttgggatgtctatgagggagatactaagttagctccctactcaggcatagagtgcaaaggaaagccctggaatgaaggtgtaaatttgtaagccctctgtatgcagatggtgattgaagctatgagcatgcatgcagctttcttgagagatgatataagagaacagaaatggattcatccctgtgaaggccatcatttggtgaaatcattctccatctgggttgcacatgagagtcatgaggacagctttagaaatgctgatgcctgggttctagctacagaggttatgattttatcgttgttttggtctggtatgtgacccccgcatctgaaattgtaactgcttcccaagtgactctaatgagcagctaaggttgaaaaccctcacttcttagctgggaagtggaaaataaactgcaaaggaaacagaacatatcaggtagagaaatagagggaaatcaagtaagaaggagtggtcagagtgcctagggctgctgaggtccagcaataccagaactgaaagtgccgctggatttagcaaactgaaggtcgctggtgacatgagtgaggtcactcattatcatcttccgtggcctctcaaaggctgaaatgatgtggccatccaccctgctcaggctttataaagatgacacaggtggcatccaggtgtggggtttatgagtgcagtcaagggtgatggggacttattgctgctctgggtgtgtggagggcaatttgtctatatctatcaaaattataaatgtatgcatcatgtgtcttgataatcctacttctaagaataacacaatggcatatgcacaaggttattcactgaaacactgcttatataatagcagcaacagactggaaatggtgcaaacacccaacgtcagggcatacacaaccatcaagagaaatacagacacctgctatgtcctgccagggaatagtctccaagatacggtgtgtgaagacagacgagtgcaaaaacaggcagaatagcagtgttggaactcctgttacacggaagcggcccaaagacacccatttgcatgcatatctattttctctgcaaggacacttgaaacaggtgaaattggttacttcctgggacagacactaaatgtgaggtgactagggaagggaaagagagagagagttttcactgtatttgtgacctttcacccatatggctttcaaaccattgaaacctattgaaaataaaaactgatgagaatggtatttccctgagaacaggggagggggaggctgtattttggggtgtaaggaaagcagagtttttcagggaccacacctgttactttgtatcccaattcatttaagtgtgctgatagttttcattgtatttgttgtattatttgtttgaaatcaacaagattgcaagaactgggatgtgttatttagagtttatgctggaagactgattgttcatcaatgtcaaagatacactttagagataatatctcactcctgaagtccttattatttccagtagccaaactcaatttctgaagttgatataaagctcactgggctaggaagcaggagtctgagattgggtcttagttttatcaatagcgtactcggtggccttaggtaagttgcttcatctctcttcactttagtttcccgtccatgaggtgaggttggtaatccctggcttagctgattcccctaaactctaaggaacaaaggggaccacagatgtacttgtacttggtaaaatatagacacctacaaatgtgatgggtctgctatttttatcctattgctgcttgaactttgaaaatctatttgaatacatgcatacacacatgtatacacatgcatacatatatgcatatatatacacatacatgcatacctgcatagacatacatatatacacacaaacatatatgcataaaatacatatatacacacacacatacatgcaaacacatacacatatatacatacacacatacacacaagcatgcatgcacacacacacacctctccaagaaactgaagacatccacattttattacaggacaaagactgagcaattttccaaacctccactcacatgcccaggaaaaggcaaatggctatcttagctaagccagaactcttgcccggaaagctagcttggctaatttcctgagaagcccacagggaagaggcttgaggaacagcacctgtccaccagccaacaagattgatccctggcctcccttggcggggctggcaggacagtgtagcaaggcagctggccaaactctccccaaggctcgccgagcttttagctagtgatcaggtctgtaaagcctgacctttatcgtaggataaaagtaggctttgttcattcatttcatcttccctaaaggtaccattagcgatttattgatttttctttttagagaaaatcttaaagtttctttttaagacagagatttgagcctgtgcatctaaccctccccaacttccaccttcctgctggcatacaaaacagggaaagactgtgtcagtgctgaagctccggaggaaagagagccccttggcagaaacactgtagacttctgctgggccaagagctggggaaggcagactgcaaggaggacctaccttacataggagaccacgtttgcctggaaggcgagtggaggaaaacccaggggacgccactagtgcctcagacttaaagggagagctggactgcagatgacgatggacagaggggttgcctggggtgcacaggaatcccaccaatatgcacttatgcaaagtggctccaaactgcacccagtcaagatccaacagcagttattccattcccctcattgtcaaagtcctcaggaccatcccagttgatgggagatgaaggaacagagacctcatacactctcccctaccccctttcttattcccaccagtggcacaagagggttctaggtccccctcactcctttatcctgtcccactccatccttgatggaaggagtcttttagcagaaaaaaagtgaattaaataaagcccaaatgtagtgagagaaaggtgtgtctgtctacaggtattttactatgagaaaggtgaagatacaaggaggcaagatttgaggtgggagctgggaggaggaaggaaacccaagagaaagagatgctcagcagatctgggagaggagcccggcactgactgagggagttgctgaagtgcctcttgattccaggtgctttgctgctccctgacccgcatggtgggacccttcttggtgacagggaaagcctgcagccctcccagtcattgtcactgatggaataaatgcatagttctggaaataagtcctctaaaattctgctcaattgtggcaccatctactttttacctctgtactttcatttttaattccccaaaatgttttactataaattcttattagccaaaacatgctttaaggattgaaacaaacaaaaacctaaaatgacttatcgtctcctgcagaccaatatccagggtcaggctgggcacagtggctcacccctgtaatcccagcactttgggaggctgaggtgggaggaatgcttcaggtcagcagcttgagacatgcttgggcaacattgtgagaccctgcctctacaaaattaaaaaaaaatttcacgtgtgatggcacacatctgcagtcccagctacttggaaggctgaggtggaagcattgcttgagcccaggaggtggaggcagcagtgagccctgattgcactgctgtgctccagcctgctgtttttgaaaaaaaatcaaaaaacaaaaaacaaatccagggtcatgggctggacatggctggacatgggctggacatgggctggacacataggagcccactgatcggccttcctgtcgtgtcactgcccgtgacaccaaatggacactcatctccttcaagctctccacacccttgctccctcaggccccttcacaaatgccagctcagatgtcacagccttgaaggaccctgctcatcccgaccccaaggggcggaactcatctcgcccacccacctgctgctcatcactgagtcctcaccagtgtatgaccactgcccattagactgcgtagagtcagtgctcatcactgccacctccacagagtctttcccaggacccagctcaacgtttatggatggaggctgtgtttgaaaggtttccaggttgagtccccagacagccaggtatcacggtagccaaggacaggatgtgccagaaacggatgaagtcccgcccctgtgccaactctttcaattctggatgcagctctgcaactgaagctcccttatcatccccattgcacagggatgatgggaaccatgcggggtcagtttcactctgggaagtggtggagctggggctcgctctaaggggacagcagagctggggctcgctgtacgaggcagtggggctggggctggctgtaggaggtggtgaggctggagttcgctctagggggcaggggggctggggctcactctaggaggctgtggggctggagtttactctaggtggcagcagggctggggctcactctatggggcagtagggttgaggctggttctaggaggtggtggggctgaagttcgctctagggggtggtggggctgggcctggctctaggaggtgatggggctggggctcgctgtagggggcggcggggctggggctggctctagaaggtgatggggctggggctcgctctagggggcagcagggctggggctcgctgtagggggcggcggggctggggctcgctctaggaggtgatggggctggggctcgctctaggaggtgatggggctggggcttgctctagggggcagtggggttggggctcgctctagggggcgggggggctgggactcactctaggaggtgatgaagctggggtggaccctggcattctgactccagcactgtgtgtctaatgatcattagaaaagtttccatacttttttcgctttagaaaaatggtgctgtgtcacagcttcttcaagagtcaacagataagctgtatgtgccatcccctgtaaggctgggaaagagccattgctctccaggtcacaatggccagggagcctttgcccagaccctgaacgctgagcaaaggtcacgagtagggagttctctctggatcagatttttactccaagtaatctctcccagccttgcagtgtggtgtttctaagtacactccaaagtattgccaaagatgaggcagtcaaggaccagcactcacacagggccttaattactcaaagatctgtgtgtttactgaatgaagatatttatgccattctaagaaggtttacacaggaaaggtttacaaaaaaaagaaaaggaataatagtttgctttatgcaaaatcttaggcttaaagtggaattgactccaagattccctaggatatagaactctaatgccacctttagagcaagctttctctactatggagttttcgggacctgagctcacagtcctctcccttccttcctctcctgcttcttcaccctctccctctctctgttgcctccagggtcgtagggccattctgcattctgccctaacatctttctgctatctgggaaaagggcccatgcccagtgcttcagggcaatttccagctacctccaagcccagagaggtgctctcagcatggggcctccactcaccctgtggcatgactccacccacccacccactggagcattcctgccccccatattctaccccctggctgtgaaccttcataagaggagggagtgggggcacctactttgtgccctgccacaagattgggctggatgaaggccatgccatgaagaaaacatcagacaagccaaggagggtgcaggctcttgcatggatcacagagttcccagggcagtggagtgaggccggtgggcagtgtggacagtatgtgccccagagtccaggaaggcagccatcccattggcctggggcagggggaggaggatcaaacccctttgccaagaaggggatgatcataggcccttcccctgccccctgccctcactgctggctccctgtcagtcctcgagagggcacggcacagatgtgggtgctgcttctttcccgtgggtggtcttcattttttttttttttttggagaccgagtcttgctctgtcgcccaggctggagtgcagtggtgtgatctcggctcactgcaagctccgcctcctgggttcacgccattctcctgcctcagcctcccgagtagctgggactataggtgcctgccaccacgccccgctacttttttgtatttttagtagagacggggtttcaccgtgttaaccaggatgatctcgatctcctgacctcgtgatccacccgcctcggcctcccagagtgctgggattacaggcgtgagccaccatgcctggccagtggtcttcattttaacacagtgctgcaggacaggcatcctgggggaggacagggaggggcagagggtccctgtgcagttgaaacaactctcaccctaaatgttcttctctctcagtggatttccattgctttttcctgcccagcatccattattcccaccttttggaaataagatactatttttttctgtcagcttgtatagagcgtgagaggctgaccaaccttctggatgtgggtgtgggtgcagaatgcaggcctggccaagctgcacttcattctccaggacacagtgattggctcagaggcagcaagtgacccaagacccctcagccagaacaattacgggttcatttgcaggacagctgactgccctgggcaaggtgactttccttaatcgggattattaaatggctaggatatgaacttggagctgctggctctgacaagagggaattgagcttgaaatggagtcaacacaggataatagaatcagcagatggtgaacataagattcctgtaatgctgaatgtaatgatgacctccttggagaccctggatccagccttgcctgaaagccctttcttggactttttagttaagagggacaatatatgtcctttttagtttaaagcaatcccagttgattttctacagtttttctctgtgattcctgattaatacacttcctttggggagaaaatgacacagcactttatcctcctctcatctggagaatgtcccttcctcaaaggctctactcttctctcttgctcttttctgtttcttcaggactcatgggtggacagtgagttccctatcactgaaagaaggtatgtgatatggtttggctctgtccccacccaaatctcatcttgaattgtagttcccataatccccacatgttgtgggagggaccaggtggagataatcgaatcgtgggtgcagttatctccacgctgttctcatgaaagtgagtttacatgagatctgatggttttataaagggtttcccccttcacttggctctcattctctctcctgccgccctgtgaagaggtgcttctgccatgattgtaagtttcctgaggctccccgagccatgcagaactgtgagtcaattcaacctctttcctttataaattacccagtcttggttatttcttcatagcagcatgagaacagactaatacagtatttgatgatttgttgcctacctggtggcaatgtggtgaagggaaaggtgtttaactaaactctgcttttccttcccctctaatctaagaccttatatcagtatctaatgggaaccttcccatccgtcaaatgagagggcgatgaacaatcctaaatgatgggacacatttgctctgtgtcaagcactgtgctaagtattccatatgttcacttctttaaccccaaggcgctgaagggcaggggttgctgcccactccttgccaagatttaacagctgctggaggctgtatggcttggaggctgtggtgatgtgcagatcccatggtgtgagtgcaggctcttcactgctaggtgagttacgggacctggtggggcactggactggtgcgcactcctctccacttcctgtatggatagacacctgctatctgtgcctctccacctcctctccttccctctctttggctaagacctgggccttgatgggagaaaacaggttcagagcagtaggacctagggagagaaaacacgtgagcataaaataggagtgggaaggagagggctggtggctggggcagtagagggagaggttcccctttagaggttgtgagatggaggccctggtgggtcaggggttgtgggagatgtggaggagaagagatagaggacaagtgtgtgtgtgtgtgtgtgtgtgtgtgttataggttgggttccttttaatcacttttgggagaagttcaagactttaagttattattattactactactcttttttatttttagcccagatggtgtgtctctatagggactggaccacacgagtcaggaagactcatatcagagtttgattgcgtatttctccatctacccacccccgactcatccatcatcctctctccctctctcctccctccagttcatgggaagttagcatgagcattctgccagcagactatggagaacagtgcaggggggtgaaaatgaagagacagttaagagagcaacacacggggctaagaggccaagctgatctgctgggccttacacctgggtgtatcagtggaagtgtgatgtggacagagcacccgagcttctctccagcttaggagcagtccgcgttgggggaaagggagggggttgtttttgttggctttggctgtctcccagcccattagggatcagggtctatgctgtgtgctgtgtgatgctctgagggctgccttagctccgggtgaaagaggatatctgttagttttggaagtaccagtgtcaggcagctgagtgttttcggctttcaaagatgatgccctctgtgctcctggagccattctgctaatggaatgtggggcctgttctgagggattaagccaaccctgtggtcagagccaggggtcactgggtgttctgtctcctggaagtgaaaggaggtggtttcacaccaatgattaggaaagcagtgagcatcagagtgggtctgattgcagaagctctgtgtttgcaggagaatccaggctcctggggaccggaggttagtcctggccataagtctatcctggaaggatagacttgaagcaggggacagtcacagtctaaatggctttggggcacatggttggtactgggtaaatacctgctgacttgaattaaaagagagttttgtgatttgactccttaaaataatgtttaaatgacagatgcctccaaggcaaagcaacagaagctgagattatgaacaaggtcccagcacctgtgtcctctgtgaccgatggttcaggtgttgctgctaccaggaagtgatggagagagtatctgggctgctctgggtaaatcccatcctttctctgggcctcctctttctgatctgtagaatgagataataagagtatctcccttacggggccattaggagaagtgcgtcatggccgagggcactgcatggcccctgctaagctggcaggtgtggcccgggtctcctgcttccagttctgagaattccaactctgaggctgcttgcctaacaaaagcttgtgtcccggcttgcacagaatcacattgagggttccactttgttcctaatgaggtaaatataacagcaggttccagtgaaacaatttgtatgcccatttgaagcaagacttcagctctgccatgctcatttccaatacatttgttactcttacctattcaatagcattcagatcattcaatgtctaatggaaaccttcagtctccctaccctgtcctgttcttacttcttttaccctaattcaattttctctgtttcatcttccctgatgtttcagaaacatcatgattcaggccacacacacataaggagcatccatcagggctatgacccctccagccctcacgaaggtgctatatggttcccagcagtgggggagacaggcacactgttaccaggttgccctgcgtgagccagtgagacacgggtgctgatggccatgaggtggaccgccaggacccaggtcccactctggaagccaggttcatcggctcttcactcttactgctgggaactgcacggggccttgggaagccctctttttccttctgaccaccggagggcagaaaacttgcagggctgagctgtccatggtgtcacaggctctgtccactgagaccaggtgtgagaacaagaaatggacactatctaaaagggagggagtgggaatgttctgtgtgtacacacaggagccctggaggagctcggtccatgcctggctggggtaacccgggtaggcagtctggaggagagggcttgagctcgtgttgaccaatggataagagttctacaggcaagcacaaggaagggaggacaattgaaagagggacagcaggaccagaggcatggaggtgcactgtgcatggtgttattgtgaagaagaggtggaaaggagagcatccaggtggcccccatgcaccaggggctgggacagtttcaaggcaattgctgaaatctcacgatagtcctgagagtgggtgttttgcatgtgacgaccatgaagctcagaaaggtaaacctatgggctgatgtcccccagccggactcttgagccctgggtgtctgattccaaggccacactcctcctattgcacaggtgtgctttcaaccagacactgccttcccaactccccctggagggaaggcttgagcgctctggtttacacagggcccgctggatttctgtcaatagggaacgtgccgttgaagttgtaccagacctgggagagcctgcagcctcgcctgcaagcacagcctccaattacgccagtgcatctcctgctcatcaattccccttggtggagtagggccatgtgttctttgtttggatctaaatcctgctgctctattgattactataattcagccctaattggacttctgcaaagcacaggcacagatgacagcaggcctccaggcagcgcagcatccattattaatatgatggtgttggcctttcccctgcactctgccttcacctcgaggagtctggaaaacagacctcccgagcaacgtgccttccctgtgaagtcatctcctcaaaatatttgtttcctcttggagaagaggtgtgcaaaccgcacagctagcaaacaatgctttaattgcctttctgccagcccagggaaacagtctatgagcccctccttccaagttggggaggacactcagaccccctcgcaaggaagggactgacctttgtgagtagccaggctgcaggagagctgcaggcagactcgggggccagcctaaattcagagaagccagtgaggcagagaccagaatttgtacctggctgcccatgagaatggcccaagcagaagggtcacattgggccaagcactggagatggccaagtggcagcagagagtggagctgtgttccgtgggctcaagcagaacagattctcattattggaacaggcctaggtagccttgctacctaacaagaacttgggcacaagtgaagagtttcatagcctgctgaggagtgaaatgtcagcacatttgttcagctgaccgcagtgagcagagcgcccaggtggcagctctggttagcggactctggcaaatggtatgcccttccaacatgggattgagtatttgtaggatgtcagagatgggaagagctatgcaatcgtcttggccagccactctgtttatagatgggcaaggtaaagctgagatcagaaaaggaagctacctggggtcatgcttttccattctccagacatttggtctccttccctaatcgggggaaagtcaggtgaccaccacggatctggtcagacagggcccagggcagctatatgagctgctcagattctgagaggacaggtcagggctgggtgtagactgagccaagcacctagcctggaggttgatttttctaaagccaagtcactgactctttgtgaacagtggcaggcagtcaaagtccacagtgcacccacacatcacttagatcattccacaaaccttacttgtgggattagtctggcgggctgtgggataactccaggcatggctgacaaaaaccctgccctcctgctgcttatgggaagacagactgtaaacaagtcagcaaacatacagacaagggcttcaggtcacccaaaggctggaaagcaatggcactgcacggggaacatgaggaggagtggccggaggatgagctttgcccatcattaacagtgacatttccattccctgggctgccccctgctgcctaaggggctcactgcaggggcctgcacttggcccttattctgcaagttgttctttgtgggagaatggagttgagatcaggcatgtcctgcagcagtctccacccctatctagccagccacaggagtctaccattccctctcctgctctgcaagtcctagagtttctcttgcagtggacacaggtgttccttaggagcacaggccatgccaggtgtttctgcctgtccttagtgctttaggaacaccctatgagtgaaaacatggtcatagggaaggaacacagtgctgggtggagatggagactgacagctttgtctacccagctctacaaaacgctgggaatagctatccctgggaaccttaccagggggctgggagctggtgcattccctaccagaacaggcagcctcattagctcccatctgttcacacccaccccccaccaggagacaggactgctgtctcctacatctacacggctgggcccctggctgctgcagtgggacctggtgggagccgatgtcttctttgcgcctttctcctcttatacgtctctgtcccctctccttctggagaagaaggctgccaggacctgtgatcacagccaaggggtcagtcccaatctcagggcaaaaatgtgaggacaggcaggagtagccctccttcctggggagcataggtggggtggcatgcatgtaaaatacatgacccttgcctgtctcttccgcatgtctgcaccttgctttcagtcaacttccttgtgtatctttgcactgtgatcccaactgttatgttagtatgaaatctcaatcacttgtggagaagatgagcaactgcctccttctagttgtgctttgttggggaggaacagagctgaggcctgagggagagcagggaaagaagtaagggccttctgccagtctcatggcacctgaaacaagcaccctcactctaccaccagccactcctgccgcctgctccatcatctttccattcaccgttgaaagcctcagtcctccctgtgttttatttgcctctgtgttttatttgcctctgtgtgccttgaaaaacagagcagtccgtgtactactgagtgactgtgaagatcagtgagggtaggtaaagcccaaaggacaatgctggcaggtgagtgctggtcaaggtggccaactcccctgtattagtccattttcacactgctaattaaagacatacccaaaactgggcaacttacaaaagaacaaggtttaatggacttacagttccacatggctggggaggcctcacaatcatggcagaaggtgaaaggcacatctcacatggcagcagacaagagaagagaacttgtgcagggaaactcacctttttaaaattatttatttatttttttgagacagagtctcactctgtctcccaggttggagtgcagtggtgccatctcggcttactgcaagctccacctcccgggttcatgccattctcctgcctcagtctcctgaatagctggaactacaggcacccaccaccatgccctgctaattttttgtattttagtagagacggggtttcactgtgttagccaggatggtctcgatcccctgacctcgtgatccacccatcttggcctcccaaagtgctgggattacaggtgtgagccaccgcacctggccggaaactcacctttttaaaaccatcagatctcatgagacttattcactataaggagagcagcacgggaaagacctgcccccatgattcaattacctcccaccaggtcccttccacaacacatggaaattcaagatgagatttgggtggggacacagccaaaccatatcattccatctctggcccctcccaaatctcatgtcctcacatttcaaatccaatcatgccttcccaacagtcccccaaagtcttaattcatttcagcattaactcaaaagtccatagcccaaagtcttatctgagacaaggcaagtcccttctgcctgtgagcctgtaaaatcaaaagcaatttagttacttcctagatataatgagggtacaggcattgggtaaagacagccattccaaatgggataaatttgccaaaagaaaggctcaggccccatgcaagtctgaaatctagtggggcagtcaaatcttaaagctccaaaatgatctcttttgactccatgtctcacatccaggtcatgctgatgcaagaggtgggttcccatggtcttaggcagctcttcctttgtagctttgtagggcacagcctctcacctggcggctttcacaggctgctgttgagtgtctgcagcttttccaggcgaatggtgtgagctgtcactggatctaccattctggggtttggaggacagtggccctcttctcagagccccactaagcagtgccccagtagggactctgtctgggggctctgaccccacatttctcttccacactgccctagcagaagttctctatgagggcctcacccctacagcaaacttctgcctggatatccagatgtttttatacatcctctgaaatcaagggagaggttcccaaacctcaattcttgacttctgtgtacccacaggctcaacaccaaccacatggaagctgctaaggcttggggcttgcactcactgaagccatggcctgagctgtaccttggccccttttcgtcacaactggagcagctgggacggagggcaccaagtccctagactgcacacagcatggggaccctgtgcccaacccactaaaccagcttttcctcctacaccttcacctctggacctgtgatgggaggggctgccacaaaagtctctgacataccctggagacattttccccattgtcttggtgattaacatttggcaaactgttatgtatgcaaatttctgcagccagcttgaatgtctcctcagaaaatgggtttttcttttctactgcatcgtcaagctgcaaattttctgaaccgtttcactgtttcccttttaaaactgaatgcttttaacagcacctaagtcacctcttgaatgctttgatgcttagaaatttcttcctccagataccctaaatcttctctctcaggttcaaagtcccacaaatctctagggcagaggcaaaatgctgcaagtctctgctaaaacataacaagagtcacctttgctccaatttccaacaagttcctcatctccatctgagaccacctcagcctggaccttattgttcatatcactaccagcattttttgtcaaagccatgcaagtctctaggaagttccaaactttcccacattttcctgtcttcatctgagtcctccaaactgtttcaacctctgcctgttacccagttccaaagccaattccacatttttgggtatcttttcagcaatgccccattctactggtatgaatttactgtattagtctgttttcatgctgctgataaagacatacttgagactgggcaatttacaaaagaaaaaggtttaatggacttacagttccacatggctgaggaggcctcacaatcatggtggagggtgaaagacacatctcacattgtagcagacaagagaagagagcttgtgcagggaaactttttaaaacaatcaggtctcttgagaatcattcactatcacgagaacagcatgggaaagacctccccgcatgattcatttacctcccaccagatccctcctacaacacatgggaattcaagatgagatttgaaggaggacacagccaaaccatatcatccactgctatagcaagcacagaataaaaagcttttgtttatttccacagtcctggttcatccctgccctgctcctcacctagaaagatgagccctagaacaatgcccattctttctcttgcctgccatgcaattctcacctcagcaggtaagtgggagtccccagtggtgccagacctcctagatgagccatctggagatggacatgcaaccttctgtggacacactgtagagtgctgcatggcctgaaaccccctgcctggggagggccaggttagaatgcaggacataggaaaaggaagagggtggcaagaagaggaggggcagaacttgagtttgaaaggcccaggcgtgacacaggggtggcatctaacccaggccttgaaggatgaattagaaaaaactaaggaaggtttggggccagtgggagtgaggcataagacagaccaaaagaaatgcacagaggcggaaaattctgaaggaaacatgactatttgtagctcagagctattcctgcttccctgtgggaccctgaatgccggtagttcaaaagcactttccaacgaatgcagattaaaaagacttaaacctctgtttcccttttctccatatacataaaatgataaacacccctgggacggctaggatttatataggcagattttttgaaagtttgtcttatatatctggactatggcttataaatcaaatttggttctctttgctggagagtaaattatttatccaaggcagagcaccaggcgatagaaggagaggcacagagaagacactgttttccagaagtcatttatattccccaagatgaggaagtgtcgggggtggaagtttctgagttacagattctggcgttccttcttgattcgtgtgctctctgctggtagccatggactcctgaaattggctttctgttgaagacatcatttgtggaattcaaatcagtgttttgcatttgggtccagcaccctgggtggatggctgcctgaattgagcagtgaacatattcagctggggaataaggggaccatcctgcgagtccatcaggctgcactgagttcagctccaccatcactctccctgggatatcaagcacacttagaacctcgctgggcttcagtctccttatagctggagccagagagtaacatctgccccttggggtctttgcagggttgaatgtgactgcatcgcacacagagcaagtaataataataagggagctcaaccccaatgccctacctaagagtcatcccagtgggagttgtccaaatgtgctccaggaggcttccctgctccagaaccccaagggaggtctgtgaggaggtgaaaaatgtctacacttttagtcaaatctcttaaggagaaaaaccactggttttatttcttttctctttttgtcattacaatttccaaggatcgagtgtgagtgttcatgtatgcagggccacgatgccatgctgggctggacccaggaggtgcctctctttctctgttatcaccaagcaccacacagaaatgtccttccaccagacaggcactcaggaagcatgggctgatagatacactttaggaatccagcaaagaactgtgagatctacactctaaaaatagaactatctgctctcaaaatttactatgggatgacatcctgggagctacccatcactgtccccataaacctagtgccccaaggtcccatgaacttcaggtcaccagaattatttttctctgaatttgacatttaggagaaagtaacggctgatagggagcagtgctgggttcgcaaggcctggaacatccctcctgggggctgcctctgccccacagacacctcccaggtggtcaccagcttctgcagctgcctcttgcatggggtggagccatgctcagagctaaaatactcagtcgctgctggtcttcaaaatccaaggacagttccgttttatttaacaaactagatttcctgaggcagaaaggtagacttgtcttttccagaaataatgctgaaagtgttaaaataaaaataattatttggaagcccaagttgattccaaaattaatctaaaataattcattccctgagcattttggtttattgaggttttacagcctcatgcaccaagtatttccatagtgccactgtgggcttagcactcccaccacaacaccaggcaggcagggcgggcctgcggaggagcatttgctatgtgctcagaggtctggaagggtggctgtgacagtgtggaacccagggacagagctgtgcccaggatgaggaaatgcagaagcaccttccagctgcggaagagcaaggggaaagcggagggttgagctgcatcccccactaaagacatgtggaagtcctcaccccagtgcctcctgatgtgatctgatttggaacagagtctttacagagataagttaaaatgaagtcattagggtgggccctagtccaatatccatataaaaaggagaaacgtggacccacagatagacacatacagagggaagagaacacaaggacacgcaagggaggaaggccatgggaagacaacacaaggacatgcagggggaggacagccacagggagatgatgtgaggactcacagtgggaggatggccatgggaagatgacatgaggacacgcagggggcagatggccatgggaagaggacatgaggacatgcagggggagcgcaggcacaggaagaaggcacgaggacatgcaggggatgatggccatgggaagatgacgtgaggacacacggggagaacaaccatgtgaagaggacatgaggacatgtgggggaagatggccaaaggaatatgatatgaggacacacggggaagatggccacgggaagatgatgtgaggatacatgggggaggacagccacaggaagaggacatgagaacacacacagggacgatggccacaggaagaggatataaagacatggagggggaggatggccacgggaagaccacgtgaagacatgcaggaggagacagccatgtgaagacgatttgaagacatgcaggggagatggccacaggaagatgatgtgaggacacacgggggtgggggcatggccatgggaagaccacatgaggacacacaaggggaggatgtctgcgggaagatgacataaggacacacagggggaggacatccatgggaagatgacatgagggcacgtggcggaggacgtccatgggaagatgacatgaggacacgcaggcagaggacgtccatgggaagatgacatgaggacacacagaggaaggacgtccgtgggaagatgacatgaggacatgcagggggaggacatccatgggaagatgatgtcaagatatgcagggggaggattgccaaaggaagatatgatgtgaggccctgcagggggaagatgtccatgagaagaccacgtgaggaaaaacggggaacacgtccatgggaagacaatgtgatgacatgcagtgggaggacagccagggaagatgatgttagaacacacacagggacgatggccacaggaagaggacatgaagacccacagcgggaagacggccatgagaagaccatgtgaggacgtgcagggggaggacagccacgtgaagacgatttgaagacacatatggggagatggccatgggaagatatgtgaggacacgcagcagtggggatggccatgggaagaccacatgaggacacacagtgggaggacatccacgggaagatgacgtgagaacacacaggggatgacatccatgggaagatgatgtaaagacacacagggggaggacgtccatgggaagatgatgtgaagacatgcgttgggggatggccacaggaagactacatgaggccacacagggggaagacgtccatgagaagatcacgtgaggaaatagagggggagacagtcatggaaagatgatgtgagaacacgcaaggggatgacttccatgggaagagatgatgtaaagacacacgggggaggaagtccatgggaagatgatgtgaagacatgcagggccacaggaagatgacatgaggccactcagggggaaggcgtccatgagaagaccacatgaggaaatagagggggagatggccatgggaaggtgatgtgaggacaagcaggaggaggatgtccttgggaagatgatgtgaagacacacaggggatggccctgtgacccagaaatgccaaggactgccggcaacaccagaagctgtaagaggcaaggagggattctcccctagagccagcagagagatggccaaccttttgaattcagacttctacctccaggcctgggagaccatctgttacagctgttttgggccaccagtatttgccactttgttatgacaggctcaggaaactaacgcaaggagcatcttagcttttgttcctccagaagctcacccagagaacaggatgcacacacaggtagatttgaggggcaggactccaggaaacactggtggaggagaaggggaatgaggcaaggaagggatggtagcaggcagacgctgtgctgtccagccaggggcctctgcagacaatgacacttaatgcccatggggaaactgggagttagtgtagaacatgcactgcagctatctgactcaatgttagggagctagggtatttatacaccaatgtccatgagctgagggctgctgttaccagggcagccctgataaaaataactgggaaagtttatttttcgtattgttttcctttattccttcatttacaggcacagctacttaaagaaaccagggactatgccagaacttcttgacctctggccaggtaccagaggaagataaaacctcacaaactggtgcaaactggaacagaggatccctggttgcctttagatcattaagatattatggtgctaaaattccctcccttaaaaaaaactctgccatcttttatacatgtgatgtatgaagatgtatgtgtatgaattgcacctgcccatctggaatctcgcatgctcaagttcctctcccagcctgtaaccagtctttaaaaaccccatgtgtcctaggcttcagggagaagatgcatttagaatatcagcttgccatccccatttctagccagtgaacagaaactggttgccttttccaattagactttttttaaatgaccaatacaaagtggaaaaagaactctgtttactggtaacactactgcttgaggataggggtggtgttaattctctggcacttggtgtaggtagcaaacttgctctggagaccagagaaagccctaggaagggcctgggctggcaggaaagccctcaggcagggcctgggaggcagtagggacaagaggcatggatggacactgacagtgctgcttcagggaacattgggaagggggagagaaaaaggcaggaaagttacctgtgaagccagactgccaaacttggatgtcaggctagagtctggacttcattccttagacagtagggaggtgataaaggtttctgagtggaggaatgaccagattagagctcagcttttggaaaatgaatttggcagggagaagaaaaaacagaacactgacagttaattgtgcttgcctgacagtgctcagtgagaaagacaggactaaagtgacatggcaaggaggagaaggcagtaggaaatgctggctaactgccccataagccacagagtcctggttcatagactgtcaaggaaactgagggtcagggtgtggagaagggtggctccagggcacctgggataagcaggtttgggagaagaactgtccaccatatccttcactccctgtcctgagtccacatttcagaccaaatgagaaacataagccactgggaattgagcagatggcttttccaaagcttccacagttttcattccatccaaatcaaacgtggattggaagccacagggtttgtaaatgccactgtgccatttgaagctaggatctcgtttgccaacttgcagcctgcacttcagatgcttcaaaagagagggttatccacactgacttataaataaatgaagaaactaaataatgcattccatcctaatatggctctcatttccttgatgattatgtaaaaaatcactaacctaaattgcccaatagatagaagaccctcaaaaggaaacccgagggagaactggcctttatccattccatataaatcacagagatgctgcttttcctcacatctgaggagaggggcctccaggctggggctgcacagggcggtagatgcttcctcctcctcagcttcctgactgcctgagaagagtcagcctctgtgtaggggctggatctgtcagttcctgggttaccaacaagcccggtgctcagggagggagtagggacagtgggttctcagaagcagttctgagagaatcccgttgtggacttagcaggctcaggcaaaagagaggattaactctgcttgggccaaaccatgcgatgcatctgcttgcattgggaggaagatggtcaccaggagctggcaggactgttgttcagaaagcaatgccccaaagatgcatttactcattctactgtcaaataaaggaagggcaggaagtttttcagagggaagggagcctgagggtcctcacttcccaaatgcctggcatttactcatttcatcttcacagtgagtcctactgccaccactgtagatgagaaaactgagtttcagaggtggagcaagcagccaacataacacatttgttaaacagctgggttgggacctcatctctggactcctacgcacaccctccatccacactgtaagctgctggggaggaggttaacagcacttcccactctgaagttgcctttaaaaaaattatggagggaggttccaagatggctgaataggaacagctcccgtctacggctcccagcatgagcgatgcagaagatgggtgatttccgcatttccaactgaggtacagggttcatctcactggggcttgtcagacagtgggtgcagcccatgaagcacaagccaaagcagggcgggacaccacctcacctgggaagtgcaaggggtcagggaattccctttgctagccaagggaagctgtgaccaatggtacctggaaaattgggacactcccaccctaatactgtgcttttccaatggtcttagcaaacagcacaccaggagattatatcccatgcatggttcagagggtcccatgcccgtggagcctcactcactgctagcacagcagtctaagatcgaactgcaaggcagcagcaaggctggggaaggggcgtctaccattgctgaggcttgagtaggtaaacaaagtggccaggaagctcgaaatgggtggagctcacagcagctcaaggaggcctgcctgcctttgtagattccacctctgggggcaggtcatagctgaagaaaaggcaacagaaacttctgcagactaaacgtccctgtctgacagctttgaagagagtagtggtcctcccagcacagagtttgagatatgagaatggacagtctgcctcctcaagtgggtccctgacccccgagtagcctaactgggaggcacctcccagtaggggccaactgacacctcatacagccaggtgcccctctgggatgacgcttccagaggaatgatcaggcagcaacatttgccattctgcaatatttgctgttgttctgcagcctctgctggtgacacccaggtaaacagggtctggagtggacctccagcaaactccaacagacctgcagatgagggtcctgactgttagaaggaaaactaacaaacagaaaggacatccacaccaaaaccccatctgtacatcaccatcatcaaagaccaaaggtagataaaaccacaaagatggagagaaaccagagaagaaaagctgaaaattctaaaaatcagagcactcttctcctccaaaggaatgcagctcctcaccagcaatggaacaaagctgaatggagaatgactttgacgagttgagagaagaaggcttcagacgattggtaataacaaacttctctgagctaaaggaggatgtttgaacccattgcaaagaagctaaacaccttgaaaaaagattagacaaacggctaactagaatagacagtgtagagaagatcttaaatgacctgatggagctgaaaaccacggcacaagaaccacatgatgcatgcacaagcttcagtagatgatacgaccaagtggaagaaagggtatcagtgattgaagatcaaatgaatgaaatgaagcaggaagagaagtttagagaaaaaaaaaagtaaaaagaaatgagcaaagcctccaagaaatacgggactatgtgaaaagaccaaatctacatcagattggtgtacctgaaagtgacagggagaaaggaaccaagttggaaaacactattcaggatattatccaggagaacttccccaacctagtgaggcaggccaacattcacattcaggaaatacagagaatgccacaaagatactacttgagaagagcaactccaagacacataattgtcagtcaccaaagttgaaatgaaggaaaaaatattaagggcagccagagagaaaggtcgggttacccacaaagggaagcccatcagactaacagcggatctctcggcagaaactctacaagccagaagacagtgggggccaatatgcaacattcttaaagaaaagaattttcaacccagaatttcatatccagcgaagctaagcttcataagtgagggagaaataaaatcctttacagacgacatgagcaaatgctgagagattttgtcacccccaggcctgccctaaaagagctcctgaaggaagcactaaacatggaaaggaacaaccagtaccagccactgcaaaaacatgacaaattgtaaagaccattaatgctaggaagaaactaacaagcaaaattaccagctaacatcataatgacaggatcaaattcacacataacaatattaaccttaaatgtaaatgggctaaatgccccaattaaaagacacagactggcaaattggataaagagtcaagacccatcagtgtgccatattcaggagacccatctcaagtgtggagacacacataggctcaaaataaagggatggaggaagatctaccaagcaaatggaaaacaaaaaaaagcagaggttgcaatcctagtctctgataaaacagactttaaaccaacaaagatcaaagaggacaaagaaggccattacataatggtaaagggatcaattcaacaaaaagagctaactatcctaaatatatatgcacccaatacaggagcacccagattcataaagcaaggccctagagacctagaaagagacttagactcccacacaataataatgggagactttaacaccccactgtcaacattagacagatcaacaatacagaaagttaacaaggatatccaggaattgaactcagctctgaaccaagatgacctagtagacatctacagaactctccaccccaaatcaacagaatatacattcttctcagcaccatatcacacttattccaaaactgacaacatagttggaagaactcctcagcaaatgtaaaagaacagaaattataacaaactgtctctcagaccacagtgcaatcaaactagaactcaggattaagaaactcactcaaaaccactcaaccacatggaaactgaacaacttgttcctgaatgactactgggtacataacataatgaaggcagaaataaagatgttctttaaaccaatgagaacaaagacacatcataccagaatctctgggacacatttaaagcagtgtgtagagggaaatttatagcactaaatgcccacaagagaaagcaggaaagatctaaaatgaataccctaacatcacaattaaaagaactagagaagcaagagcaaacacattaaaatctagcagaaggcaagaaataactaagatcagagcagaactgaaggagatagagacacaaaaaaaagcccttcaaaaaatcaatgaatccaggagatggtttttgaaaagatcaacaaaattgatagacggctagcaagactaatacagaagaaaagagagaagaatcaaatagatgcaataaaaaatgataaaggggatatcaccaccaatcccacagaaatacaaactaccatcagagaatactataaacacctctatgcccataaactagaaaatctagaagaaatggataaattcctggacacatatactctcccaagactaaaccaggaagaacttgaatccccgaatagaccaataacagactctgaaattgaggcaatacttgagagcctaccaaccaaaaaaggtccaggaccagatggattcacagtcaaattctaccagaggtacaaagaggagttggtaccattctgtctgaaactattccgatcaatagaaaaagagggactcctccctaactcattttatgaggccagcatcatcctgataccaaagctgggcagagacacaacaaaaaaagagaattttagaccaatatccctgatgaacattgatgcaaaaatcctcaataaaatactggcaaagagaatccagcagcacatcaaaaagcttatccaccacgatcaagtcggcttcatccctgggatgcaaggctggttcaacataggcaaatcaataaaagtaatccgtcatagaaacacaaccaagtacaaaaaccacatgattatctcaacagatgcagaaaaggcctttgacaaaattcaacagcacttcatgctgaaaactctcaataacctaggtattgatgggctgtatctcaaaataacaagagccacttatgacaaaccgacagccaatatcatactgaatgggcaataactggaagtattccctttgaaaacaggcataagacagggatgccctctctcatcactcctattcaacatagtgttggaagttctggccagggcaatcagacaggagaaagaaataaagggtattcaattaggaaaagaggaagccaaattgtccctgtttgcagatgacatgattgtatatttagaaaactccattgtctcagcccaaaatctccttaagctgataagcaacttcagcaaagtctcaggatacaaaatcaatgtgcaaaaattacaagcattctcatacaccaataacagacaaacagagagccaaatcatgagtgaactcccattcgcaattgcttcaaagagaataaaatacctaggaatccaacttacaagggatgtgaaggacttcttcaaggcgaactacaaaccactgctcaatgaaataaaaaaaggacacaaacaaatggaagaacaatccatgctcgtggataggaagaataaatattgtgaaaacggccatactgcccaaggtaatttatagattcaatgccatccctatcaagctaccaatgcctttcttcacagaattggaaaaaactaatttaaagttcatatggaaccaaaaaagagaccgtattgccaagacaatcctaagccaaaagaacaaagctggaggcatcacactacccgacttcaaactatactacaaggctacagtaaccaaaacagcatggtactggtaccaaaacagacatatagaccaatggaacagaacagagccctcagaaacaataccacacatctacaaccatctgaattttgacaaacctgacaaaaacaagaaatggggaaaggattccctatttaataaatggtgctgggaaaactggctagccatatgtagaaagctgaaactggatcccttccttacaccttatacaaaaattaattcaaggtggattaaacacttaaatgttagacctaaaaccataaaaatcctagaagaaaacctaggcaataccattcaggacataggcatgggcaaggacttcatgactaaaacaccaaaagcaatagcaacaaaaccaaaattgacaaatgggatctaattaaactaaagagcttccacacagcaaaagaaactaccatcagagtgaacagacaacctacagaatgggagaaaatttttgcaatctacccatctgacaaagggctaatatccagaatctacaaagaacttaaacaaatttacaagagaaaatcaaacaaccccatcaaaaagtgggcaaaggatatgaacagacacttatcaaaagaatatatttatgcagccaaaagacacatgaaaaaatgctcatcatcactggacatcagagaaatgcaaatcaaaaccacagtgagataccatctcacaccagttaacaatggtgatcattaaaaagtcaggaaacaacaggtgctggagaggatgtggagaaatgggaacacttttacactgttggtgggagtgtaaactagttcgaccattgtggaagacagtgtggcaattcctcaaggatctagaactagaaataccatttgacccagccatcccattactgggtatatacccaagggattataaatcatgctgctataaagacacatgcacgtgtatgtttattgtggtactattcacaatagcaaagacttggaaccaacccaaatgtccatcaatgatagactgcattaagaaaatgtcgcacatatacaccaggaatactatgcagccataaaaaatgatgagttcatgtccttttgtagggtcatggatgaagctgaaaaccattattctcagcaaactatcacaaggacagaaaaccaaacactgcatgttctcactcataggtgggaattgaacaatgagaacacttggacacagggtggggaacatcacacaccggagcctgtcatggggtggggggagaggggagggctagcattaggagatataccttatgtaaatgacgagttaatgggtgcagcacaccaacatggcacatgtatacatatgtaatagacctgaactttgtgcacatttaccctagaacttaaagtataataaaaaaaaaaaaaagctgaagatgattaaaaatgataacaaaataggcaaaaaaaattatgatagaaagaaaatctgacgtaattgactccatctcacttctaccaggctgaattgcttttgctcattcttgtgtggaggccataatagtccttttcttgattttctccctgccttgttcaaaggttgaaactatatttgtaaagactgatcaaaggccagaaggtcagaattctggtagaggcctgaactttgctaaagaatgggcacaattaaacaataatcagccattgttggctcagcttaattttactgccccagagtcacataacagaggtcacaagatttgtaacttccccagctgctcctacaagtaacatcactattgtgaggcctaaaggactggtctttgagatatttttctgatttagcattttgctaagagttaccacctgggcctgtgaccaacaccaatggatagactcaactggccctgtgacccttgggtaagaaatgactcagccacagtttccacacctcagtgactttatccccagctaatcaattgtttcagtttcccagtcccctccccagcaaagaacccataaaaaccctagcctctgaattctcagggaagtggatttgagaatctctcccatctccttgtgtgccttccctgtgattattaaactctttctctgctgcaacacctgctgtctcagtgtattggcttttctgagcaattgacaagaagcacccatggggctctgacaacatcatggtagcagcctgctccttcaactgctattgagtggaaaggaaaccctggtgtccctcccccttccccaggaaggactgggcactagcccctgagggttgatggtggatcattattcattcattaattcattcattctcttatcagcaccttccaatatccagtcaacaaacaagctgagaaggcccaggtgatggaaacctcctcacagaggctgaggaagggagatggatgagccccaaagcacactaccaggttacagaataagtgctgtggcaccaaaacaacatggtggcatggtcacaagagtgaaccccacactcaaagccctgggctggagtccagccctcaccaactacaggactcagtttcctcatctataagatgggggtgataaaaatgcccattttatggagtgtggtgggaggactagaggagatgtgaaggtgtttagaaaatctctggcatgtggtggctgtctcatgagggactagccatggtcactaagtatcactgtcatgagatgagaacatcttcttgggtttgcagatctgctgtgagggcactggcctgggtttgccacatacccctctaggtattcacaggcatttaaatgcctttagccttcacagtgacggtcaccctttaagaaggacacacattagcatctgtctttgacagaggaagaaccagtgcactgacgggctaagtgacttgtacaggacacagtgctaacacaggggtgagcctgaatccatcccagacagtggcctccagcaactgctttcccaaccactgcaattccactgccaaagaaaggaagggcaggaagtctttcagaggggagggagcctgaaagtcctcacctaccgaatgcctggcatttactcatttcatattctcagtaagtcctactgccctcactgtaggtgaggaagctgaggttcataggtgaagcaagcagccaaagtcacatatctgttaaacagctgggttgggacctcatctctggactcccctgcacaccctcagtccacacttcaagccacattctccatctagcctcgccaacaggcctcaggacctacagctatgaccatcctgttcacagtatttgctttgttttgattttaatgcttctctgaaaggatgatgttcacctttcttgacctcagagaagccagagaggagatagtcatctccgtggatggcaaaggcccatgtgttgtgagtggcagccaccccctagctggaggtcaggtccacatagaatccccattgtaagcacaccacagtgatatggctacctgagtaaatcctgtggggaagtctgtggatgcaaagactcacctgtaaagcaaacggtcctgcttccattcaccatgttcatcttctgataatgtaagaagcacatcgtatgtgtgatgtgcgtggtgactcacaccataacagtggctaccacttattgagaatttacaaatgtcagcagctatcctaataatgtcacatgttatctcatttatctgggacaacagctctatcaggtaagttctgatgttatcatcattttccaggtgctacctcaatcgagaaggcagggcagggacactccaagtgtgctccctggatcgatagcatcagtgtcacctaggaatattgcagaaaggcacattcttagtctcagatcaggtctgttgtatcagagcctctgggcagcaccccgccatctgtgctttcataagccctccaagggattcttttttttatgttagttatttattttagattcagggggtacgtgtgcaggtttgttacacgagtatattgcattatgacgaggtttgggcttctaatgatcccaccacccaagtggtgaacacagtgctgatacatagtttttccatacttgcccccctccttccctcctcggttttgaaatcccgagggtttattgctccagtctttgtgtccatgtgtatccaatatttagctcacttttttttttagatggagtcttgctctgtcgcccaggctggagtgcagtggcgcagtctcggctcactgcaacttctaccttccaggttcaagcaattctcttgcctcagcctcccaagtagcagagattacaggtgcccaccaccacgcccagctaatttttgtatttttagtagagacagggtttcaccatgttggccaggctgctcttgaactcctgacctcaggtgatccacctgcctcggcctcccaaagttctggcattacaggcgtgtgccaccatgcccagccccgtttagctcacttttaagtgagaacatgcagcattcagttttctatttctgcatttcttcactttaggataatggcctctagctgcatctatgttgctacaaaggggttttgttcatttttaatagctacacctgcaggtgagtatgatgtgttaaagtttgagatcaaccagactagggataacaaaagacctcaagatctcaatggcttacatcaggggctgtcaaactatggccaaaggccaaacccagcccactgctagtttttgtaaatgaagtcttattggaacacagccatgtccattggtttgcagtgctgcctgtgactgctttgcagatacagaggcagagttgggtaagtttgacagagaccacatgacctacaaaccctaaaatattttctctctggtcttttttcaaccctggcttcgagcaacaaaggtcatgtctcggatccactgcaggtctatggaggccagttgtggctctacattctgtctctctttctgtcccaggctgcagtggcaggctctgcctggggctttgtagcacattgggctaggaaaaaggacacagggagacacatgcaacaattaaagcttctgctctgaaataacacacatcattgggtcatattccattagcccaagcctaatgtccttggaatattaaagaataatccaacctccacactcaatccatctaatccgacaatccagccctgtcgtcgggtcacaaatacccagcttattctccttccacatgcagaacccatacccctctcccaagagaggtggcctagctagtcataacatcaggctcaaggcccatctcaggactgtctctgtggggcagagtgatctctctgacctcctgaacaaagataacatgcaccatggaacagagacagggtggccacagggacattcccagctggatcaggtgggggcggggatgggagcagtctcagccctacgggtggatattgataccactccataggaaggcccacagtaccttgtcttctgtgccccttaaactatagcctggcattatcctaagaaaattaaggcagaaatagaaaaccaaataccgcacgttctcacttaaaaatagaagttaaatgttgggtacacatgaacacaaagataggaaaaataaacttcagggattccaaaatgggggagagagggaggggttgaaaaactacttattgggtactatgtttgctacttaagcaatgggaccgttagaagctcaaacctcagcatcacgcaacatatccatgtaacaaagcacctcggcatcacatgatatacccaagtaacaaacctgcactcagcatcacacaatatactcaagtaagaaacttgcactcagcattacacaatatacccaagtaacaaacctgcacctcagcgccacagaatatacccaagtaacaaacccgcacctcagcatcacacaatatacccaagtaacaaacccgcactcagcatcacacaatatacccaagtaaaaaacctgcatctcatcatcacacaatatagccaagtaaaaaacctgcacctctgcatcacacaatacactcaagtaacaaacatgcacgtcatcaccagcaaatacccaagtaacaaacctgcactcagcaccatgcaatatacccaagtaacaaacctgcactcagcatcacacagtatacccaagtaacaaacctgcactcagcatcacacagtatacccaagtaacaaacctgcacctcagcatcacagtatacccaagtaacaaacctgtacctcatcatcatacagtatatccatgtaacaaacctgcacctcagcgtcacccaatgtacccaagtaacaaacctgcacctcagtgtcacacaatgtacccaagtaacaaacctgcacatgcatcccttgaatctcaaataaaaataaggtaaaatgcagattctcagacaccaaaaacaaaatctatggcacaagaggttttctctgttctattattcttgtccccctctaatgagggtggcagaaaataagctctacctgtggaaacagttctgtttcctcagcctgcttcctgaccagatgaggccgggggctcaagggttgttttaagccccagacaggctttggctgtatttgcccaggtctgtgattcttttgcagcagaattctcttaaaacatatttgtttcttatttatttgattccaggcagatccaggtagcattgaccacactcatgtccaattctcctgacttaattgtgggtgccctgattgcatctggcttctatgggacagtcactccctagtcttttgtcctggagccataatggggaaactgaggctcagaaagatgaagtaaactttctctggcttcagctctgggattgaacccagctctctaggtctccagagctgtctataccacctctgcccatcatccaaaatgtccagacttatactcctattctgtgtcaaataattccacagccttaataagcaattgtcagaggcttgaagaaaactgaattagatgtccctaagaactgcagaactctcagaacttaaagactctgttcagacccctgccctaagatgcttgaccaaactccagcatgggtcctagcaggatgaggccatgtccccaggatgaccccagcccccgattaaaatgcctgcctgagaaagatcaacattgccaggaaagtttacttttcattccaggccacacctgacctgggcctctgacctccctttcttaaagcatttactaaaatgagcttataattgtgaatgtatcttctgcaactcaggagcatccttgtggaggacccaagagctgttcctttgaaatgcagtcattaagaaggatagtgcctctgtctcccagcctctgtcagagaatggagccctaacttagatcactgcccactggcagacccgattggcctcaccgcatttaccccaaccaaccctctgaccattttcccttctctggctctgctgagcccccactcttcccacttcctccttctccctttaatacacccagctcacctctgcaggaatcagaatggggctctgctcttccccgcactggataaccactgttatccagtagttactggataactactgtggataactactgttatccagtagttactggataacatctgttttcaccactttaagtagtatccggctgtgtttatttttgacacccccttctcacccaatacttctttcacagacacccctttgctttctcccaaggctcaagtgtccttatcaaactttaaggaatgttaacatcactgggaggtgggagcatgcttgttaaaaacacatagctccaagcaccaatctctcgggatttcatttcatagagtgggtagagactgggaatcagcattttagcaaggaagactacctcctcagccccccaggggattctggtgcaaaggtaggcttgccactctttgaggaacattgccctatcaggtctgtaatttccacctgctaggggatgaataacgttctgtgagaaagtagcaagttcttccaaaggtgcttgcagacatgtgagaagaagcacttcattaatttgcaccccagtccttggaggtggcaccgtgacagttataattatccctcgattacttggagggatttaagtgttcttagagaacaaacttaggcacagaagttaagtgactgccaaatgcacccagcaggctggtggtgggaatcaggccatgaaggggcagaccaaggacacacaagtccccgcagaggccagacattagctacaaggtacaataaatcacctcctcttgtgcaccaacccagaaggagggaagaaagcagagaaggacaagacaaaaggaagaaaagagtcaactaatgttgtctcaatccacaggccatagaagtgcttcactgaatttcataaaacactgagttagttgccaatagtttcaaatcagatagctgcacataagaatgtaaatctcagcttctcaggaaaaatcagaggctctggaaacacacagagctaagggcagcaattcactttggaggcagcgtgcaacctcctgccactaaatgactgccatgctcattgacctgtgcaggccccagaggtgaccccggcccagtcagtggatcatacttcccgtcacagctaagcttggggagaggactagcgtttcctctcctcactgagtgtcaaataaatacctagcttggagggtctgcagagtggggctcctgtgatggacaagtgcttccagtgagtgtggaaagccctttatcttcttccaagagatctgtgcaaactccccctcctccagcagaaaaggcaatggtctggacatttcattgcaccttggaacaagtaaatcactttggactttcctaaaacctgctctgtcaccatcggccattgccaggccaaggaaacagagaagaatttgtggaagcaaaacagctccttgcgggtgagaaaaatcttacttaggtttttctggcagcagaagcagttgaacaaagagagacttctaagagaaaatgaaaagctttagaatgagtttatcgccaacaaagccagctcaagcttggggctttttcataatattttaaaattaagttaacattcatttaacactaaaacaggaatttaatgaagtctgaaaaataatccggcctttgaatgagatatctaaaattccattttaatatgcaaaacaatgtaagataattgtattcaagcaataattcaaaaacattttatcataattgcaagttcacacaaaaatatgaaggaaccactgtaatattctcaatatgaggaaatatgggggaactaaaaaagtaatggtctttaattcaaaaccaactaataaggcatatagataagtattagattactgtacgattttatctgcaacagttaaaccctggaacatggctgagaatcagtgaaaaccaaagtcatcctctgtaaccagccagatgcacagtcacttctggtcgcaattagccatgcttggacagtcacgttttctccttaagaaaccaaacagaattccagattctctctatcctgccacaggttccctgttcataacacattttttattcttgagtctattagctccagatgatatccagaaactcattttcaaaagcagcttttagaaatggcacaaaacggctgggcgcattggctcacacctgtaatcccagcactttgggaggctgaggtgggcagatcacttgaggtcaagagttcaagaccagcttggccaacatggtgaaaacacatctctactaaaaaaaaaaatacaaaaattagctgtgggtggtggcacaggactgtaatcccagctacttgggaggctgaggtgggagaattgcttgaatccaggaggcagaggttgccatgagccagggtcatgccactgcactctagcctgtgtgacagagcaagactctgtctcaaaaaaaaaaaaaaaaaaaaaaagcacaagacaatatggatattttcctgtaagtgaaatttataaacatgaagcccacaattatagagcaaagatagttgctttgcgtttcctaggatcaaatggaagcccctattcagaactaaatgggctggctgtggtggctcacacctgtaatttcatcactttgggaggctgagaagggagcattgcttgagttcaggagttcaagaccagcctgggcagcacagcaaaaccctgtctctacaaaaaaatacaataattagctaggagtggtgatgtatgcctgtagtcacaactactcgggaggctgaggcaggaggatcaattaagccccagaggtcaaggctgcagtgagctgtaatcacattattgcactccagcctgtgcaacagagtgagaccttgtctcaaaaaacaaaacagacaaataaagcataaacaatttaaaccaggaaatttcttctgatctattctgtgtgtatgaagcacctcctatctagaacatgggagtgatattgtacatatatgataaatccaataagatctctttggagtgaggggtgacatgagcataggagactggctttatgcattgcaaaattgtcaaatgctgtcttgggactccttgggttatagatgacataagcctacccaactcaacttaatcaaaaaaggaattaccggttcttgccactgaatagttgggtttggatgcagctggttgcaggagattcaacactgtcatcagaactctgcatctctccacatctcttcctggtgttggcttcattctcagacagtctgtctcttcatatagctttctgcaggctcacagttacattagccttgcagcaatctcaggaggaaaagtgtctcttaccctatggttctagcaaatattaaagagttggcttgttctgactggatcatcttgaattgaggagaaatccctaaacctactgtagtagccatccatggaaaagaagtgttctaattggagagaacaggtttatggactcactccaggatccttgggaaagaggtcttagccccacccaaatgtcatagattgcgcttggaggaaaggctaaccccctaagaaaaaatcatggtgctgttatcacaaaaagaagacaagaataatagacaagtaaaaatacccattgcttcctacacatgccctagaagacatttaatgtatgtgcagtgggcattcagagagagaaacagaagtgttataacacgtgcactgcctcacatgtaacaggaaaaggacaaggagagggaaggaatggaggggaagctgcccgcacacttggcttgagttcagtttctttggatcctctattttctcataaatcacagcccatttgacgataagaatcacctcttccagtacccaaccattgtggacctaagaaactaaagttacatcgatctatgctccattcatgattaattcattcaataaatactgatttagcaactactctgggcagagtcctcatcgatattccagagttagagtaatgacaatgagcacacaaaaatccttgtccttgtggagcttacagtcaagtcaatggacacagataacaaataggaaagaaaaaaattaacataaaggatgtcagagggtgataagtacttgggaaaaaaacaaggcaggaaagagaaaaggtgtgtcaagggtaaagagacattcttacagtaagattatgaagtctaaagaaagtgaaggagtacaccatatggctacttaagggaagagcattccaggcatagggaacagcctgtgcaaagccctgaggtagatctgtgcctagacgctttaagaagaccagtgtggcgtgagagtgagcagtaagtagatgaagtgagaatggtaacaaaaagtagagggtataggaccttagatattgtaagaatgctggtttttactctgagtacctgggaaacagttggattatttaaatagtagaggccataatatgacatctatttttaaaacatcaccctggaatggactacagagggaaagagcaaaaacagggagacatctgcaataatctaggttagagatgagacggtggctaaggaattttggccatacttggaaggtaaagctgacaagatttgctgaaagatttgatttgggctattctccaagagagtagtcaaggatgaccctgagaatgggtcatccatccatggagttgctgttcattggtgcagggaagaaaatagaagaaacttgtgagaaggtggtagaaggtaggagtttcatgttggacatgttgggtttgagatgttggttagacatctgagtgagtctggagagtaggtagctggtatacaattctacagttcaggaggcaagtctgagatagaaatgaccatttggaaatgaccatttttgtcgtgtgtataaggtatttaaagccatgagattaaaggcaatcactgagagagagaccgttaataagagaggatacgtataaagacagcctggggacgttccaattttagcaatcaaggaaaggaggagaaaatggcaaagggatctggaaagcagacccagtaacgtagaagaaaagctacaagagtctggcttcctggaagccaaatgaacaaaatgtttatggaggaaaaacttttcaaatactgcaaatatttaggaaatatttcagattgcaaataggccaagtgagatgaaggctgataattgacaatttcctggccaatgtgtaggtcattagcagtttcagtgtagctataagaacataagaactggagataaaaaatagcagcaattcttttgtagagttttgctgatatatcagctatttggaaaggtgacctgctggttcaccagcttcaaaaaaactctttaatttattgtctcatattaatgtatgatgaggagccagactctgttggagttatcctctgcatagcacttttcagaaagaataaaaatcacagaatgacaatgtaaatcatcaagaccaaggtgtttccaaccaatctcaaattaagataagcacgctgttcatatgaaataagccagaagttctctatttcattcttttttttttttcttgaaacagaatctcactctatcacccaggctggagagcagaggagcagctcactgcaacctccgccacccaagtagctgggattacaggtgccagctaccatgcccagtagagacagggtttcaccacattggccaggctggtctgtaactcctgacctcaagtgattcgccctcctcggcctcccaaagtgcttggattaaaggtgtgggccaccataccctgtctctctatgccattctatatatcaacacaaacatttaaaaatgttttattctttcttctttcttttcagtaatattttcagatttccggttccaggcatggtagaacctttctacagatagcaattacaaattctaggggaaaaaatatactagacctggccacttaagggaacttggaagcaaccagaagcaagcagaacctgaagagatttttcattgcaaataagagagtgcacagagagtacgacccatattcatacaactttgtcccttaggtgcaagctgaaaactgtagttatattgacttgagatgtcaaagaagggagtttgaaactgctggtgtggatgaaaaatgaaggggaaatcctttaaaggaagaagtcacagaggagggggagtcaccaaacctgtctataagctacgctccaatctagactcatccctaaactgcatgtgaatgatggagactttaggaatcaaaggaaataacaatagctggaaggctaaaatacagaccagatatgtcagcctcttttctgtgcatgggagccagcgtttggagcttgtatcctagcaagttaaaggggcctgagaaagacttcaggcattccactgaaatcctagaaagactgcaccttaggaaagaacattctacccctgaattaagggattcttcctaggtctaagggcaaaacaatgaacttaccctaaccaagcctccagtggctccagatggtctaccaggaatttatctgggaccaggggcagtggttcatgcctgtaatctcagtgctttgtgaggctgaggcagaggatcacttgaagccagtagtctgagaccagcctgggcaatgtagcaagaccccatttgtacaaaaaaataaaaaaaaataggagtaaatgcctgtaatcgcgataactcagaaggctgagatgggagaatcacttgagcccaggagttcaaggctgcagtgatctatgattgttccattgcactctagccaggcaacagaacaagaccctgtcgaaagagaaagaaagaaagaaagaaagaaagaaagaaagaaagaaagaaagaaagaaagaaagaaagaaaagaaagaaagaaaggaaggaaggaaggaaggaaggaaggaaggaaggaaggaaggaaggagaaagaaagaaagaaagagaaaggagaggaaaggaaaggaaaggaaaagggaaagggaaaggaggaaggaaggaaggaaggaaagaaggaaggaaggaaaaagaaagaagacttgggaacttagtaataggagaaaaaaatgagtaaaacaaaactcaacactcttaagaagaaactaacagaattcagagtctttacaaaatatcattcacaaaggcctcagaaacctcactcctggccccacttgtccccagctctctgtggaggaaagtacatggagcccctgggaattgtgggtttcctagttaaaaaagaaaaatcttctagcaaaactttacactgtaggccaggtacagtggctcatgcctatactataatcccagcactttgggaggccaaggtgggaggatcatttgagctcaggagttcaagaccagccttggcaacatagcaagatctcatctcgactaaaaatccaaaaaattagctgggtgtggtgcctcacctgtagccccagctacttgggagactgaggcaggaggatcacttgagcctggtacattaaggctgcagtgagctatgattgtgtcaccgcattccagcctgggttacagagaaagaccctgtctcaagaaaaaagaacaaaacaaaaaaaaaaacactgtaaaagaaaaaacacaggccactccctctagggtcacataatcaagccatcgaacccaaatctagggaccctgagattactttaggatggtgtgacatttaaattagagcctgaagatctggtaagcctgagccaggaagaggaaaacgatcaaatgcccagagacgagagagaacatgggtatggctggagtatagggaccagggaagggaggggaaggactggtaggaaatgaggcaggagaggcaggcagatgagaaagagcctcttccattgtattaagcaagttgggttttcctgagagtgatggggtaccaacaaaaagattcaagaaaaactatatcaacaaaattttagtgctgaaatatcctggcttctgtaatgagccgatctggagaaattaagtatgaggtatccaccgaatgtccagattctgtaagaaatttagttcattggttcagaactcagcataatggtttaggctgctatggattcttcagcctactaggtatgactaaaaccctggaagtaaatgagatactcagggagcaactggggaaataaaaaggcccaaggcagaaaactgatagtcaccagcatgcagcctaattggttaatgcattaacagatagcactggcataacatattttatagtacagatagggcctccttgaaatcagtctaaattaatgaggtgtccaacactcaggtcacttaattgatttctgtttctctctctgttttagaggatcttgtagaaaagtggttctctatcagtggacatgtggtatgtctgaagacgtttttggttgccacaactggaggggggatgactattagcacctagtaaatggaggccagagatgctgccaaccaccctaaaatgcacagacagcaccctataacaaagaaatatctagccctacatatcaatagtgctgaagttaggaaaccctgttgtagaagcactttgactaccgtaggcttaccagcccatgcacactgataacttctgcactttcttcccaagcatttctgtagggggatcccagtttatggttaatatcaaaggaccctcaagcacactgttagcatcacataactgaataaatctaaaatctgaaaataccagactacacagattttggggaatatgggaactattgcttttacttattactatcaatgtgagaaaactaaacagaccaattcagtgacagagaaggagtgcttaggtcagcactgagggttctctgctaagagggatacagcagatgtctgaggaggctcaacaggcatcacggatcctgtgcaggaggtctatgatgccatgaacacaaaccacatacagttatgtacaagagggatgagtactgccaggaagtgcttagtatttcacgtgtagaatggtctctctgatcttggaggaaatattcaaccagtaatttgatatttggtttctgttaatgagataagtgaggatcatgtaaccaaagatttaaagagtagcagagagtcccgttcactgattatgctggtgtagtgctgtgccgcgctgttatctaaaggaaagagggaagacatgggatttgcttggagctgagcctcagggtgactttgtcctcccagaagtgaatttcccactgtcttaagcccctgctctgacgcaaagcagagctgggctctaaagcccaaatggagaaaagaatccagtttgagccaaaccatttagcctggtattccaatgggaatgggtgtgtctggcaaactgataagatagtggaccaaaactctacttgaatggagaatcgcagaacctctcaaaagagtactggagggcagagtgagagagagagagtgagagtgagagtgagaatgagagtgagagaaagagcaagagagagagagagcgtgtgtgtgcacacaagtgagcatgcttaagcaagtgaatcaggctaccttccactccaagtgtggtcctccaaccagcaacatcaacatcactcggaaacacagaaatctcaggcccaccctgacctacttatttagaatctgcattttaggaagatccctggtaaagtctgagaagcactgattttaccctttgttgagggaagagggtaatgtcctcaggtacaggtggttactgtctaccagaaaccctctccacccatccccttagttcatatctaaatgctgtggcacccctagaagagctatttcattgaaactctgctcacttgttgggttaaagacagatacagctttggtacagggagcacattaggcaaatcaagggaaatacatttcctcacactttgccaaacacagctacggcacctctcaacccatattcaaggctctgtccagattcctcaaacatctactccctccctctgagcagaggacctcccaaagttgacttaagtaatcagatggaaacacctcagctctcctctacccaatacataagtacatctggcttcctctcacaaaccacttaaaagagcagaactcctctctctatacaaggtcaaatcctgcagggctgccctggaatgcagacagctgctccctgcttagagatcacatcatgtcaaataccctctccactggcttcatcctgttggcattaaagcatgctgaattctcttcgagaattactttggaaagaattactaccctgtaagctttcctattcagccatgttgacttcaaaatttgtttagtacaatatttcaaacagaaattttgtgtctgctgcccattttgcacaactcttaacccttgtttacatttgtttcagatacatttgtatttccaaaataaaacaattgttttaactaaagttccctgtgttcctctctctgacctctgctaagaggtaactgctgccctcaagtgtgtccatacacaattcatgaatgctttatgtttgtactatatgggcatgtttccatatgcaacatagagtattattttgcaaacccttaacattaattagaaggtataatattatatggattattctgtatcttgctttcacatgaacagtttttgagatattacaatgttgacttcatgctctctttacttctatgctattgctggcatttatatttcctctttttaaaaccccatgacatgttctcattgttttattcaaccagagtttgtgtgattcacctacacggttatcccatcctttttttataatttttcccttcatgttcgccttctatttacaattacagtccttctgcctaaaatgcaccctttagaatcctcttaatgagagtgtgttgtgggaaaacttactcagtttttatctgaaaaatatctatattttactctcattgttgaaaaatatgtttgctgggtatataattctaggttgacaagtttttctctaagcatagtgaacatagcaatattccgtggttttctggcttttataacttttatcaagaagtttactgtcagttttattgtctttcctttgatgattaccccttttttctgatctcatttttaaggttttatctttgcctttggtcttcctctgtgacacatagggtgtattttttgcttaattatttttcttttgttagaattcacaaatctatagaatggcttctttcatctcttctggaaagttctcaaccattacctattcaaatattgcttctgttccattctttttcttttttccttctgcaagttttattggaagtgtgttagaacatcttacttcattcttctttctccattattcattctcataacttctgacaggcttctcatttctttgattctgtgctatcttctgggtatttttttgctctatcttttgctttattgtgcacattataagccattatattttgatttctagaattattttattaatacagtcagtcctattctgtagcacctttctctttatttgtattttgtttatttcttaaagcatattcaacgtgtttgtcggtgtttaataattttactctctgaaatcttttccatcctaatacttacatttctgctgctcctgattcctgtgcgtaattttttattgtgggttatatttttagaattttatctgtggaactggagacctggttagaaagcaagatccccaaggagaattttgatttgcttctgcctcatgcctttggatctaccagccagaatcaagttgcactaaatttttggcaaaaaaaattttggcctatttgggtggttcaattttgggttgcaaacctacgtgagagatagtttgtggttacgaattttaagaggttttttgtttgtttgtttgtttttgtttttgtttttactctccttcacctactcagcttcaaactttgagatggacaattttctttaaagttccctggtgagtggtcagtcatgagactgagtggtttatttctagttcacaattacaaggaacattggccatttgagatataagctttcagtgtggggaaagggaaggggaaggaagagatttctactggactcctacctttggacagactctagacttactatgtgctctacagagccacaaaatccaaaactcaaggttactcaatttagcaaataccctcaaactgaaagctggtttaaatgctcttcttgcttctgggctcctggttttacttagtttttgacctctgactattcccaatgaatgcacggttcaatgatgcattttccaatgagttatatacccagcgttttaacagaaagatttaccggagtccctagtctattttttctatcagaattgaaattttcatctactctttatataaaattgtacttctaaggttcacatttgctatggtttgaattcttgtccccttcaaaactcatagtgaaatttagctgccactgtaacgtattaagaggtggaatatttaagaggtgttttcatgaacttaatgcctctctcatcctctctttgcctttccactatgtgatgttttctgccatgtgaggatgtagcaagaaggcccttaccagaggccagccccttgattttagacattccaaccttcactgtgatattctgttaacagcagcacaaaaaaattgactaaaaaacatttaattaagttattctgtttaaaatctgtgtgggctccacattgccctaagggaaacaccgcatcctttgcatggcttaaaagccgcctccgtcttgcctctgcagatctctcgaggctttgttcttatcagtcgtctcccatgaagcttttttgctgaagctggattaaactgcttgcaatcatcagagaaccccacatcctcttcctctctaggtattcaaatgctatttccaccccttctttttttctctctttccttcttttctccatattctgccttttcttatctgactgctggtcattgtcaggtttcagttttatcgtactttatggtacttttcctagaaatctggactcagggtctttcctctgtgcttccactttacctgtcttagtgtaattgcatctttacaggtttgtgttccctgaggtttaagactgactgtgaactttccagcatggtgtctggaactcagtatgtatgcaatgctgattctttgtaataaacttttgttacaggagctctttgaagctctagttgtcatcatcatggtacccgtcagaagacggtaatagaccaggcagaaatgactgtgaaccctgcctgctgtagatgaggtcatcaaaagtagatgctgcatgccaggtggacacagttgtccaggtacctcagtggccattgtcagcagactcaacaggtctgtaagtgtgaccagatccagcagaggggctctggagtggcagtggaagcaaatgagatatcactccggacaactgaacacactcacttgtaagaaagtgtgagccaccccctggaggcttccaaaagtcttgagtgacttttatagagaaatagagctctaagttagcagtgcagagccaaaagtatgtaatggaattcattgcttaattgattctataggcaagtgaggcccagagaaactcagtttatgcccagatggatatgacatcattcctgcccctcagttaacttaccaactagtggaagaaagagcaagttaacaaaatattaactttgcaggatgagaagtgctacagagctaagctatcagagccctggtgacttagtaacaaaataaaggggcctaacacaattgctacttctcccattacctcgcccataagggacccaaagtgtgaccaaaaatcagcatgggatgggtggagctgctggtttcctgatactcttatcttcattatatataattattttatcattcaaagtatttattttttttctaatctctaaccaggccacatttcttcccaactggagaagcagagggctagctgtttgagtctaaagagtggagtggtgagggctgagcctgggaattatgaggccaaatcagagggctttatgtataaaaccaggagtctagacccttcttgaggggaaagtgggatcctcctataatctagtttcctagaggtttttttttaatcacattctagagtcattggtctctgacagagcccccagatcaaatacttgaggtccatgcaggtaagacaacaaatgaacctggccagcctcctgatgggggtatggccactgccccggctaaaagggacaacatatcccagctccaagttcctgtcctgtgagattctaagctcagttttgtgagattcatggttttctaaaaaaggccaaaaagtctagattattcaaaaatcatatgatcatctcaatagatatagaaaaagcatttgataaaattcaatatccctttatgataaaaacccacaacaaaattggcatagaagggacacacctcaaagtaataaaagccatctatgacaaacccacagccaacatcatactgaatggggaaacccattgagaactggaacaaggcaagaatgctcactttcaccacttctattcaacatagtactggaagtcctagccactgcaatcagacaagagaaagaaataaagggcatccaaattggtaatgggaaagtcaaacttacagtataattatataccaagaaaaccctaaagactcatccaaaaagctcctagatctgatcaatgaattcagtaaagtatcaggatacaaaatcagtagcactgctatacaccaacaatgaccaacttgagaattaagtcaataactcaatcccttttacaacaactgcaaaaaacaaacaaataaataaataaataaaatacttaggaatacacttaaccaaggaggtgaaagatctctacaaggaaaactacaaaacattgctgaaagaaatcacagatgacacaagcaaataggaacacatcccatgctcatggatggatagaatcaatattgtgaaaatgaccatgctacccaaagcaagctacagattcaatgcaattcccatcaaaataccatcatcattcttcacagaactagaaaaaaatcctaaaatttatatgaaaccacatagccaaagcaatactaagcaaaaggatcaaatccagaggcatcacattacctgacttcaaattacactacaaggctatagttatcaaaacggcatgatactggtataaaaataggcagatagaccaatggaacagaatagagaacctagaaataaagacaaataattacaaccaactcatcttcaacaaagcacacaagaacatgaagtgggtaaaggataccttactcaataaatggtgctggaaaaactggcaagccacatgtagaagaatgaaactggatcctcatctctcaccttatacaaaaataaattcatgatggatcaaagacttaaatataagatgtgaaaccataaaatttctaaaagataacatcggagaaacccttctagaaattgacttacacgaagaattcaggactaagaacccaaaagcaaatgtaacagaaacaaaaataaataaataagacctaattaaactaaaaatcttctgcatagcaaaagaaataatcagcagagtaaacagacaacccacagagtgggagaaaatgttagcaaactatgcatttgacaaaggattaatatccagaatctgcaaggaactcaaatcagcaagacaaaaatgaataatcccatcaaaaatgtgggcaaacaacatgagcagacaattatcaaaaaagacatacaggtggggggcggtggcttacacctgtaatcccagcactttgggaagccaaggcaggcagatcacctgaggtcagaagtttgagaccagcctggccaacatggtgaaacacggttctactaaaaaatacaaaaattagccaggtgtggtgatggatgtctgcaatcccagctacttgggaggctgaggcaggagaaccacttgaacctgggaggcagaggttgcagtgagccgggatcatgccactgcactccagcctgggtgatgagagcaagactgtctcaaaaagcagaaaaaaaaaaagatgtacaaacaccaacaaacaacaaacatatgaaaaaatgctcaacatcactaagtgtcagggaaatgcaaattaaaaccacaatgagataccaccttaatcctgcaagaatggccataactaaaacataaaaaaaaaatagatgttggtgtagattttgttaaaagggaacacttctatgcagctggtgggaatgtaaactagtacaatcactatggaaaacagtatggagattccttaaagaactaaaagtagacctgctattcgatccagcaaattcactactgagtatctacccaaaggaaaagaagtcattatatgaaaaagacacacacacacatgcaagtttatagtggcacaatttgcaattgcaaaaatatggaaccaacctcaatgcctatcaatcaacgagtagataaagaaaatgtagcatatatacaccatggaatactactcagccataaaatggaacaaaataatggcctttgcagcaacttggttggagcttgaggccattattctaagtgaagtaactcagaaatgaaaaaccaagtgggagctaagctatgaggatgcaaaggcataagaataatataatggactttggggactcagagggaagggtaggggggagttgagggataaaagactatacatagggtacaatgtacactgctcggatgacaggtacatgagaatctcagaaatgaccactaaaaaattgcccatgcaaccaaaagccttctgtatgtatcccaaaaactattgaaatgaaaaaataaaaaaaaaattaaattatgtaagtcttaaatttttaaatatttattcaaaactctttttaactctttgaggactgacagggcaccctgggtgacctctggtctatgagccaagacttcaatgccccagcccaactcagccaggactgcactctagcatcttttggagaggaaccctttcattgtgaaattcctctttcctctcaccaaccccctgggtcagggtaaactcagtaagtgtggactgtctcatactgagttgtctccaaggggtcccgtgaggttgcagggcacccgttgctgtggagtcctaaagagggctttcagaggcacaaagaagacagacacagcaacaataacaaatgaatgaaggaatcagtttttcccaagaaaagagccactgtatcccaataggcctgtaccaattccagggaaagaacaacatagcgacaacataaagcaatctgtgtgattaggatgctgcactcatcccagccaggtacatgtccttgaactggaggtgctgcgcacggcacctgtttacaaattaggcaaccggaggtgctgaaaagtattcatctcttctgctgcttccttcagtatgtataatattagcaaaatgtcccagtggctggtaaatcatctttaattcctttggaactcatcatagtaatgttaaccatgatggattcttgtggtatttaaagaactagattgtcaattagcttttatgagatacatcacagtcatcagcctcatatcagacctccctttccaaagaagccagttattaaaatgtacaataatttgcttttattataatctagctaaaagccaaagctagtctccaaaataatttaaagttttaagttgcaatgtaagagaccttttcttggaaatgactgtataatatagtgtcaccattgttggttaattatttttcagagtgtgaatttcagctaatcgtttcctgcaaggaccaaataacataggtgcttcctaacagcctctctgggaataactactgtcctttcagaagctaattaatcaagctgtgctcgtaaaaacttaagtaactacccaccagggtgagagtcccccaagacctccctgctcctggaagtctcttgcccactgtattgaccttggccgagagaagggcagtgagtcaacttgacttggcacagcacccaccagggaccttccatgccatccagcatggtcatctgcccagggctatctggaactttaaaacctcatctttactgagagtgcccttcagaacttagccagtgctacctgcagcttgaggaggcaaagacagatgagctcccatggaaacgtgggaaggtgaggaaaagcctagttctgtgttttgatttcagtaaattattgtgagtttaacttaatcaccatttgccaggcacttgaggaaaatcaaatcagggaattagctctgacctcaggaatatacagcccagtggtacaaacagacacaagctactggtaagaggaagcagagtttgcagttcttccctctgcagccccacaaaggtgcatatctccactatcaaatttatctcacgggactgcaattcatagactcttgtcattgtgtgtgtctttctccctagtagcctgtaaattccttcaaggcggaaaatttcatctctgtatctgtggtaccttgaacagggtcggtcacatatttgtttaatgaatgaatgaatataataacaataataagtaacatttaatgggcctttaatacacatctatataagcaggtcctaggttagatgctttacaaatatctcataaaattcctccaacaattctagaagggattgtatagggaagtatggagttaatactccccattttactgataagaaacgatacttggagagacgggagtaacttttccaaagtcccagagctgttaagtggcagagaacaatggatccttggtctggctgactcgtaggttcatattcttttttatcattatgcattactatttcaataaaaactccagaaaggcctacaaagttacacacaatcacatacatgcaatagagggtgatccattccaaactaaggcaggaaagcaaatacaacatgtgccataagattctggaagccttcctgcaggcagtggtccctgagctggtctttgaggcacagaaggacttttattagcattcccatcaaaaaaaaaggaccatgcagaatgcagggaaagggaggctaagtattgatatgagggtgtaagcgtgaagagtggataaattggctacaccttggaatttacttctatagtctctgtcgaccttgtagagcttcaaataagcagcctcaataccacgatcatgtctccaatccccagcccctgatattaactcaagagcagtacaaactgaatcaatgcaccaaatgatttttccccaccgctcccctgtgtgcatataaacacacatatgcacacacaccatggatacagacacacaccatgacagctgtgaaaggaagggggaacaagagctcagtcgtcgccgctggccagaggagataacatttcaggcctgatttaaactgcccattatgtccatgattcttgctgatgggtgcctcacaataaatgtcctaggcttgtctttatcaagcctcctccagtcaaggctcagagttatgagtcactgttggagggagaaggaatgggcagggaaggggttgtcagaaaaggtgtgtaaatgggacaggtccagtggtcagggcatccatacattatttctcagtcagtttgtttacataaccacaattcattctcttgggtgccctagaaaaacaaatggctagagagctgaattcaaaatatattatttgagctaaacacaaataagtaactcagttatgaggggaagccccctctcacccatcattttgccaaaatgaactcttcatggttgagtggccctcccctcacccccattcctaagattagtttgagcttgctctggaatatttattgaggagacctttcattataaagcagccaagtaccagttacctgaaatatatgcaagtttttaaagtctacattcaaggtttaaaacctttttgtgtatgaaaaatgttctacctggcctctccctgtctcatttgggagattaaacggtagctatatagttgaactgcaatttgcttgactctgaagaagccattatcattgaaattcaagacccttgatctaagatgtcttggagaactatagcacactatatactttattttagagtgcagagtacaatgcagaattaggccttgtaaaaagttacaggagaaagccttgtatgaaacaaaatatagttgtcataacaactgatctgcatgggttgtacatcacccagaaagtttgaggtgtgggttatcccaatcaagggaacagctggagtacagtcaacagtaaagcaagcaggctattttcttctgctatgaaaatggatttttcctcttgagtgaacaatgcaggaatgtaactgaagcaaagagagcctcagtctgggagggacaaggatagtaaaagccaaagaaatattccagcagggagatgatcaggatggcaaggatccaagaaagacaggattttgcaaaagcagacagcctaacttacaaggtcatttaacaccaaacagtaacaaaaaagagttctaagtgaaagacagcaaaagcacacacaaaaaagagaatcgaggttttatcagagacatttgtcaaatgaagttatagtatcctgattacaaaaaatgtggtaaggttttcactaaggttctcatctcttttgagttgccatgatgttggtcagatgcagtcattagccaacctagtaatctgtcaatgctatgtgattaaaaatgtgccagtcaccataggtcatttttcagcagtctgtattcagactatattcagatcatctgaacacagtcaccaaaaacacttgtttggaatacaaatttctaggctcttccacagacctacctaatccaaactcctaggaaccaggcatgggaacatgaatttttaatagagcattccaagtggatcttaagtatactaaggtttgcgaagtactaccatattggacaatagagaaaatatgagatgtggtcccacctgtcacaaagcatgcagtctacttgtagaatttagacagtgcttaagagtcttttgggtgctataggaccctaaagacaattaaaactcaaagagtccttcaggaaaacttccttaatctcactgtacttgccagacaaatgtgcctttcattttgtttgtcaactttcagatgacattgcctcttttctacttcttatttatttatttatttagtgtctcctctcatgcaacttaagtttcttgagaacaggagctgtctaattcatctttctgattcatgaatgcttgaatggatgatacataaatggaggagggaaggcaagagcatagcaattagaaaagtcttcctagagtaggaatgtgttggtgtaaaaacagggttgtattatacacagagcagaggaaagagcatgggtaggtatgagataaccatataagcaaggtgacagaggcagagaaggggcattgcgtatgctaatgcccaaatgtgttaaatactcaaagcaatattatagtttcaaaaacattccaatttttacatttcatttaaaattgtattaaaaatataaactacctaggaataaatttaacaaatgtgcacaagacttctatactaaaaattataaaacattgctaagagaaattaaagaagtcctaagtaaatggtgagatatactatcttcatggattgaaagactcaatatctccccaaaatttatctatagatttagtacaattcagttaaacatcaagtaggttttttttttgaatgttaaaaaacaacttattttaaattttttttgtggggagcttgataatattattagctttatttgttccagaatgtgtaagggcagcaaaagccagtcttggaattgtgtctttaaatatgcatatatatatatatatatactattttaaattttatttggaaattcaaaggaccaagaatatccagtctgaccttaacactcattataaagctattgtgactaagaaaatgtttttgttgaaagaacagacaaatatgtcagtgaaacacaattaagagttcacaaatagacccatacacatataaaatccagtgatttgtgatcagaatggcaaagcaattaaatggggaaaattatattcaatacttttttttgagatggagttttgttcttttcacccaggctggagcacaatggtgcaatctcagcttgctgcagcctccatctcctgggttcaagtgattctcctgcctcagcctcctgagtagctgggattacaggtatccaccatcaagtctggctaatttttttttgtatttttagtagagatgggattttgccatgttggccaggctggtatcgaaactcctggcctcaggtgatgcacccacctcggcctcccaaggtgctgggattacaggtgtgagccactgtagccagctttcaatatatttttattaacaactgaatattcatacaagaaaaaatccatgagtgttaccctacaccatacagacaagtaaattaaaaaaataaatgttaggcttaagaaaataacatgattcaaagagaaaagatagagaaacgtcaccatgaccttgatgtaggcaaagagtcttagcacacaaaaagcactaaccataaaaaaaattgacaaattatacttcatcaaaattaaaaaagtatcccatcatcaaaaaaataattaagaaaataaacaggcaagctacagatcagaaaaattatccatatctgactatatatttactgcaattcaattacaaaagaacaaatggcctacttttttacaaaagcagaaaatatgaacagatatgtcataaatgaagatgagtaaatggccaataagcacatgaaaaacttctcaatattattaatcatcagggaaataaaaattaaaacaatgaaataccactacacacccattagaatggctaaaatgagagaaagcttgacaatcccaaatgttggcaagagcatggagcaacaggaactctcatatattgctagtaaaagtttaatgatacagttattttaagaaatagtttaagagtttcttaaccttctaagaatattaaacatacatattatgactcagaaattccacagcaaggtgtttatccaagagaaacaaaaatatgtgtccacaaaaatccttataaagaattgtttcttcataattatcccaaactataaacatctggatgtccaccataagaagaataaatcactgtggtaaatttatataatggaccactccttggcaagggaaaaaaactactcatacattctatcaacatggataaatctcaaaaatattacggtgagtgaaagaagccagacacacatacaaaagtacatactgtatgattctatttatacaaacttctagaactggcaaaactatctatggtaaaagaaataaggtgagtgatcttcctggagggaagagattgactggcaaggggcacacgagagctttctggggtgacatatctgaccatgtgtcttaaaatgggtctgggctacacaagtataggcatttgttaaggcagttcaaattgtgcacataagatctaagtattttactgttcatagattgtatctcaattttgtttaagtccacaatttctagatgacttagaacaagataggctatgttgtggttaacaatccccaaatcttaatggcttaatacaactaatttttatctcttcttcaaagtatactgcaggactgggcaactgtccagggtagccttccttcacgttgtgactaagatccaggtcccttcagtgttgcatctccgcatctcatcttgatgcctctgccagttttcttaaagaggaagagagactggtgaacctgcaggggctttcaactgcctctacccagacatgacataagttacttcctctcacatcctatagaccaggagcagtcacatggcctacacttaatgtaaagggttggagagtacagactcctatatgcccatgaaataaaggataactagatactggtgagcattagaaatgcctgctacaataccttccttcaggcccttccattttatcaaagaagaataaagtctaactttctatcagatgattattacaatttcatccttgtgttcagacatggtcttattaatgacatgcccttctttcaacaaagggagatgtttcccttcttcaaacatggctgagctaatgttttctggtagacaggagtaaagaattctataaatgtagaaaaacacaacaaaaaaacaatctgtgaaattagctgaagaagtcagagcagatgcacatccaagttcagtgagaaggagacacaggattgctgaggtaactctgaggggcacagagtgacaagtgactgacaggccaatctggtccagaataaattatgattggggataatggccatgctagatgcatgctgctgtggagaaagtagacattatgaaagaaaaagggggtgtttatccggtccagagtgacagtttgctgcttgtcaaaaatctttatttccctataactttctgagtttgtaggtgccctggagaaaggcccactgtagcacaccacagaaaaaaaagggggaaagacaatacctgttttacaactaccttttctgtttgaaatttgcccaaatggtcttgaacatcacaacaattaaaagaaaaaaagaaaatgtttctgcagatccaataggtaagatgtcagggactctattttgaaaatatctgggaggcactgctgattaattttggcttatatttgagaagagaagcaggcacattttcgaaaccaaaatgtggaattttctgatcatgtagcacctttaaagttcagttatatcaggaatagtcagaaattggactgtataactgttcccacaaattgttcaaaggttacctctcatccagtagacagggactgaggttgcataatcaccaaagcccagctcagagaggaaacacacagaatattaatatccttgaagaatttccatccacttgggaagagagatgtagcttgattgcaggatgggttaagcatgtgtagcacacaaacatatcatcagtgttgttgatctagtgcctgcctccacttattccagaaaattgcaggagaatgattgcagggtgccaaaacaaggctgtcagctgtgaacctggtgattgatgtggcttgtttaagtgtgttcagccaaaaacaatttggggtggccagatctaccttttcttctttgggtgcataattgacacaccccatttaggtccttgactgatgtgccagtcaagaatatttctgttcaagagaaagagaacccaaatcaaattggcttaaggaaaaaacaaaggtaacttatgtgactcatatacctgaaaaagtacagtcactgagcttcagatacagctgtatccaaaccctcagatgatttgcacctcacctttctccaaatgttggctctgctctcttccttatggttttactttcagttacttgtgatttcaagacacaatttcaagtgtgatagataagcaggagtttattttctaatagatctgttcacattctctaactcacactctttagaccaacatcttcatcttggtataatgaaacaattcctgtggtcaagagatgtaattacactgattaagtttgactcatattgcaactccttagccaatctcctctgactactagggtttggtgttctgattggtcaaaccagagtcacatgctcaacctctgagagtatccccacctgaaccaccacgtaagagtgtggggagagaaactgtttcacaggggaaattctaggtatttatcagaagaagcagaaacagaatctgggcagacagaaaaaatgacatctactataaccaaagctaatggtatattttaatattatgtactggaaacaccttcacagaaatttagggtagggtccatacataattcataaaattgtagattctgagggttagaaggtacatcagaggttataaaatcaattcccaattgtgataagttgcagccaaattttaacttggtaaatgaagtggaatagagtatgtggcacccttggtagattcttaaacatttgagggtccaaaaaatattactaagtgaattaaggaaggaaggaaagtctttacagagcttcttggttcaattaaagaagctcctcttactctcttaagggttttaaaaaatgtatttggacaggtcagtttcagcttaagtactggcatcatagactatatctgactaaccctcctgccgataacaactataaagtctgcataaattttttttaaaaaggaaattgttggaaggcactagagaacaacaaaaatctggaataaaatggaggagacataaccctcaaaaagaaggaagcagactaggtgggatttacattacttatttttctcaagggtcctacaagtttgcagagcacagggtatagagctcaggtataaaatgacagtcttaatggttaaaggctggaggttggagctgccagaacactgctgaaattaaggggggaattctcagaatgaggaacccacaaatggtggatccctcatatctgtgtacgactgccttcaaaaccttggatgactcttaaatgtcatgcattgatggcagtgctcccgggagccaagcagttagcaacagctgaatggctaaaatgctgagcagagagtttagcaaccactggtttcactttcaaattctaccaagttagaggagtttgttcaataccttgagctatctattgaaacatcagaagaaccacaccttaagaataaagactatactagaactatggactatgacctaagaataaagaaaaaacagaaatatatgtgctttaacaaaacctaaaagcaagcctccacaacatcaagattattcttcagtaatttaactgcctattgcaataaaacccaacagttttcagaaaaagataatggaatctagagtctctattatctacaatgttcagtatgcaatcaaaaattactagacatgcaaacaagcaggaaaatgtgacctataatttaaaaaataaaacaatagaaacagacctgtaaatgaaccagatattgaaaatatcagacaaatattgtccaataactactataaatatcttaaaatttacaggaaagcacagatattataaggaagaaatggcatattttggaacagatacagaaacactaaaaattgaaatattttaacttgaaatacacaatacctaaagtggaaaattcagttgggtggtctatagactgaatgtttaggccatgcccctcaccgccaatttatatgttgaaacctaattcccaatgtgatggtatttggagatagggactttgagaggtaattaggtcatgagggcagagccttcatgtacaggcttagtacccttataaaagaaaccaccaaagactcacttccctttttgccatgtgagaactgctaaaagagaggcatgtatgaaccaggaagcagaacctcatcagacaccaaatctgccagcactctgatcttgaacttcccagcatccagaactgtgagaaataaatttatgttgtgtataagccaccgtacttgtatactattacactgtataagacaaaggtactttgtcatagcagcctgaaaggacaaagacagatgggcttaatagccaactgaacaatgcagaagaaaaaaaattagtaaacttaaagagaaaccaatagaaattgtccaaagtgaagcccagagagaggggaaaaaaaggattctgaaaaatattataatagagtctccatgaactgtgagacaatttaagtggtctaacaaatgtcctttggactccacaaaggcaaggagagagaaaaaacgaaaaagataggtaacatatttataagaataatagctgaatttttgaaaatgatgaaaaacaatttctagaaccaaaaaattcaggaacccttaagaataattacaggctgggtgcagtggctcacgcctgtaatcccagcacttgggagactgaggtgggtggatcacctgaggttaggagttcaagaccagcctgaccaacatggagaaaccctgtctaacaaaaatacaaaattagtcaggcatggtggcacatgcctgtaatcccagctactcagaaggttgagacaggaaaattgcttgaaaccaggaggtgaaggatgcagtgagccaagatagtgccattgcactccagtctgggcaacaagagagaaactctgcctaaaaaaaaaaaaaaaaaaaaaaaaggaataattacaaagaaaaccacagtttggcacatcataatcaaactattgacaaagataaggagaatatcttcaaaccagcccaggggtggagttggggcatacaatatgttcaaggaaacaataacagctgacttcccatcagaaataataaagaacagagagtgaagcaagatggcagaagagaagcctatagcattcatctcctctgctcccccaaacaccaaattttaacaactacctccatgtaggaaagcactgtcacaagaaccaaaaatcaggtaccagcttggccttagtggggtagagcaacaagcaggctcttagggtccctgagtcccggcctagggtcttggacagcatctctggacctgccctgggccacaggggagctcacggtcctgatgtgtgggtcttaggcttggcagcattcaccaccagctgacagaagagccctagggtggcctagcagaacccccttgtggactggtggaagtggaggctacaggaagaggttcctctgcctgtggaaaaggaagggaaggacggaaaggactttatattgtggtttgtacgccaatttagcttcagtcgaatagaatatcaggtaaattgataaggtttttgtctccaatgtctggctcctagacatcatcactggagatgtctgggtcctgaaggaatttgctgccctgaaggaaagggccttgggtgaggccagtgctgtgctggcttccagtctcactcagcactggccaagtggtggtggccataggggtgcttgcatcaccatatcctgagttccaggtggctcagcagagatagaatccttttgtttgtgagaaagtaaggcaaaagaacaagaatctgcctgataatccagagaattctttttgatcttatccaagaccacaaaggtagtacctctacaagtctgcaaaaaccacagtattattgggcttaagacccaagaaccttcaaattgctggaaagccttcccaagcacaagcacaaacaagcccagactgtgaagactacaatacatacctaactcttcaatgcccagacattgatgaaaatctacaagcatcaaccccatccaggaaaacatgacctcaccaactaaatgaggtaccagggactaatactggagaaacagagatatatgaccttttagaaagagaattcaaaatagctgttttaaagaaacagagaaaagcaagataacacagggaaggaattcagaattctatcagataaatttaacaaagagattgaaataattaaaaagaatcaagcagaaactctagaattgaaaaactgcaattcacatgctgaagaatgcatcagagtctcttaatagcagaattgacaaagcagaagaaagtgagcttgaagacaggctatttgaaaatacatagtcagagacaaaagaaagaataaaaaacaataaagcatacctacaagatctatgaaatagcctcaaaggagcaaatctaagatttatcggccttaaagaggaggtagagagagagagagagagagagagagagacaggggtagaaagtttacaaagggacaatatcagagaacttcccaaacctagggaaagataacaacattcaagtacaaaaaggttatcaaacatcaagcaaatttaacccaaaagtttttaaatgactcaaggcatttaataatcaaactcccaaaggtcaaggacaaataaaggatcctaaaagcagaaagagaaaagaaaaaaataacatacaatggagtttcaatacttctggcagcagacttttcagtagaaatcttataggacaagagagagtggaatgacatatgtaaagtgctgaagaaaataaactttcatcctagaaaggtatatccagcaaaaaaaaaaaaaaaaaaaaaaagttattttggcatgaaggagaaatgaagacctttacagaaaatcaaaaggtgagtgacttcatcaacatcagacctgtcctaccagaaatgctaaatggagttcttcaatctgaaagaaaagaatgttgatgggcaagaagaaatcatatgaaggttcaaaactccgtggtaataggaagcacacagaaaaccacagaatggtataacactgtcattgtgttatgtaaactactcttgatttagatagaaaaactaaatgatgaatcaatcaaaaataaaaactacaacttttcaagatatagtacagtaagacaaagagaaacaacagaaagataaaaatccaggagatcaagttaaagtgtagaattttattagttttcttatttgtgtgtttgtttatgcaatcagtgttagattgtcatcagtttaaaataacaggttataagatagtatttgaaaacgtcatagtaatctcaaatcaaagaacatacaatggatatgcaaaaaataaaaagcaagaaattaaatcatatcagcagagaaaatcaccttcactaaaagaaagacagggagaaaggaaagaaaagaagattgcaaaacaaccagaaaacaaataacaaaatggctggagtaagtcccaatggactaagctccccaatcaaaagacacagatggcttaatgaatgaaaaaacaatacccaatgatctgttgcctacaagaaatacactccacatataaagacacatatagactaaaaataaagggatggaaaaaatattccatgagaaaccaatatacttatatcagacagaatagattttaagacaaaaactgtaggaagcaacaaagaaggtcattacatagtgataaagtgtcaattcaccaggaggatataatgattgtaaatatacatgcacccaacactagagcaaccatatacaaagtaaatactattagcactaaagagaggtcgatcccaacatattaatagctggagacttcaacacccccactttcagcattggacagatctatcagacagaaaatcaacaaagaaacagtagactgaatctgcattatgaaacaaatggacctaatagatactaacagaacatttcatccaatggttgcagaatacacatttttctccttagcacagggatcattctcaagcatagaccatacataagatcacaaaacaagtcttaaaacattttttaaaaatgaaataatatcaagcatcttatcggaccacaatgaaataaaactagaaatcaataacaaaaggaattttggaaactatacaaacacacggaaattgaacaatatgctcttgaatgaccagtaagtcaatgaaaaagttaagaagaagactgaaaattgttttgaaacagatgataaaagaaatacaacataccaaaaacatacggatatatatagcaaaagcagtacaaagaggaaaatgtatagctataagtgtctatataaaaaaagaaaaacttcaaataaataacctcataaagcatcttaaagaactagaaaagcaagaccaaattgaatccaaaattagtataataaaagaaataataaacatcagagcagaaataaatgaatttgaaataaaactattcaaaaggtcaatgaaacaaaaagctgtttttttgtaaagataaacaaaatttacaaatcttggccaaactaagaaaaaagaagaacaaaataaataaaatcagagatgaaaaaggagacattacaattgatcctgcaagaaattcaaaggaacattagtggctactatgagcaactatatgccaataaattagaaaatctagaagaaatggataaattcctagacacgtacaagctaccaagattgaaccataaagaaatgcaaaagctgaacagactaatagaaagtaatgagattgacgtcataataaaaagtctcccagtaaagaaaagcccaggacccaatggcttcactgatgaattctaccaaacatttaaagaaggactaatatcaattctactcaaactgttctgaaaaatagagatggaaagaaagaatacttcaaaacttattctacaaggccagtgttaccctgataccagaaccaaacaaagacacattttaaaaaggagaactacagcccaatatctctgatgaatattgatgcaaaaatgttcaacaaaatacttgcaaactgaactcaacaagacattaaaaagattgttcatcatgaccaagtaggatttattccaggaatgcaaggatggttcaacatacataaatcaatcaatatggtacatcatatcaacagaatgagtacaaaaaccatatgaccatttcaattgatgctgaaaaagcatttgataaagttcagtatcacttcatgataaaaatcctaaaaaaactgggcatagagggaatataacatattaaaagtcacatatggcagacccacagctagtaccatacctaatagggaaaaactaaaagccctttcctcttagatctggaacacagtatggatgcccactttcactacttgctctagatgggatttccagtattatgttattcattataatactggaaatcctagctagagcaatcagacaagagaaagaaataagatccaaattggaaaggaagaagtcaaattatacttgtttgcagatgatatgatcttatatttggaaaaaaactagactccaccaaaaaactattagaactgataaacaaattcagtaaagttggctgagcacagtggctcatgcctctaattccagcattttgggaggccaaggtgagagagtcacttgaggctagaagttcaagatcagcctggacaacatagtgagaccccatctctacaaaatatggttttaaaaattatctgggcatggtagcacacccctgtagtcccagctactcaggagactgaggcaggaggagcacctgagcctgcactctagccttggcaacagagcaagaccctgtcccaaagaaaagaaaaaagaaaaacattcagtaaagttgcaggatacaaaatcaacatacaaacatcagtaggaattctatatgccaaaagtgaataatttgaaaagaaattaaaaaatgtaattctatttataatggccacaaataaaataaaatacctaggaattaatggcaaagaagtcaaagatctctacaacgcaaactataaaatgctgatgaaagaaactgaagaggacacacacacccacaaaaaaatgttatttcatattcatggattggaaaatcaatattgttaaaacagttataccacccaaagaaatctacagattcaatgcaatccctatcaaaatcccaatggcattcttcacagaaacaataaaacaattgtaaaatttatatggaatcacaaaagacccaaagtagccaaaactatcctgagggaaaaaaaaaaaaaaaagaggaattacattacctgacttcaaattatactgcagagctacagtaaccaaaacagcatggtactggcataaaacagacacatagaccaatggaacagaataaagaacccagaaataaatccacacacctacagtgaactcattttttacaaaggtgccaagaacatacattggggagaaggcattctctttaataaactatgctgggaaaactagatattcacattcagaaaaatgaaactagacccctatttttcaccatatacaaaaatcaaataaaaattgattaaatacttaaatctaagacctgaaactatgaaactactaaaagaaaacattgggaaaactctccaggacattggtctgggcaaaatttttgagtaataccccacaagcacaggcaaccaaagcaaaaatggacaaatgggattacatcaagttaaaaatcttctgcagagcaaagaggatacaatcaacaaaatgaagaaacaacaccaagaatagtttaaaatatttgccaactacccatatgacaagtaattaataactataatatataaggagttcaaacaactctataggaaaaaaatcctaataatccaattaaaaaacagaaaaaagatctgaatagacctttctcaaaaaaaagacatacaaatggcaaacaggcatatgaaaaagtgctcaacatcattgatcatcagagaaatgtaaattaatgagatatcatctcaccccagttaaaatggcttttatccaaaagacaggcaataacaaatactggcaaggatgtgaagaaaaggggacagacccttgtacacagttggtggaaatgtaagttagtacaactaaggagaagagtttagaagttcctcaaaaaactaaaaatagagccaccatatgatccagcaatttcactgctgggtatataccccagagaaaagaaattagtgcatcagagagatactcccgtgtttgttgcagcactgctcacaatagccaagatttggaatcaacctaagagaccatccacagatgaatggataatgaaactgtgttacttctacacaatggcgtaccattcagccatgaaaagaatgagatccagtcatttgcaacaacatagatgaactggagatcattatgttaagtgaaataagccaggtatggaaagacaaacatcatgtgttctcacttatttgtgggatctaaaaatcaaaacgattggagtcatggacatagagagtagaaggatggttaccagaaggtgggaagggtggtggggatagggagagacaggaatagttaatgggtacaaaaatatagaataagtaacagccagttttatacttgatagcacagagggattatagtcaataataacttgattgtatatttttaaacaactaaaagggtataattggattgtctacaacacaaaggataaatgtttgaggggatgatacccaatttccataatgtgattattattcattgcatgcctgtaccaaaatatctcacatacccaataagtatatacagtatgtacccacaacaattaaaaattataaaattttaaaaaaagaaataatagagatcataggacatctgaaacactatgtttaaagtaacaaaagggaaagaaagtgtcaacataaaattctatatccagtgaaaatatcctttaaaattgaaggtgaaataaagacatatgcagctaagaggaaggggagaaaaatctgtcacctgtaaacaataaatgctgaagagaaatgatgccagatggaaattcagatctaaaggaagaaattaaaagcactggaaatgataaacatgttggtaaatataaaattatttttttcttaatttattgaaaaaaccatatggacagatgttatttgacggtgcttctcaaggtgttcatccacctgtgactcaagcttcctactgttgctccaagtcttggaaattgttttgggtttttgttgtcgttgtttttgttgaggcagtgtctcgctcttttgcctaggctggagtgcagtagtatgatttatggctcactgcagccttgacttcccaggctcaggtgatcctcccacctcagcctcccaagtagctgggactacaggcacatgtcaccatgtccagattttgtttttaatatttggcagagatggggttttgccacattgcccaagctagtctcaaactcctgaactcaatcaatcttcccaccttggcctcccaaagtgctgggatgacaggcatgagccactgcacccagcctaagtcttgtacattgttatgtctgcctgctgttgattggatgaatatgttgaattgatagggacacaaactgtgggaatctgtgtgaatgcctctttttctgaggaaatgaaagtaaaagctgtttgcagatgccagtgctagggtatatcacagctcctcaaggacatcttgacagggcagagaccaaagacaacacagtgagggcttgctggagatggccacctgcaccacactggcggtgactccatggctaagggccggtaaacagagaaatctcaggagtggagacaagctgccttcatcgagggtttctggaatggattgtgcagggttattcattcagcactcactacacatgtactgaatacctactatgtggcaggcattgtgacgagtgttctacaggggtgaagatgtgaaacagtcacagtcctgtcttcatagtatgtaggggagatacagccacaaatgaatctaatatgagaaaattctaaagtaaacactcataaaaataaaaatgatagcaatagctaacaggaagtaaatccctatcatgaccagcactgcgctaagcactttatatgcacgaaatcatttgacatccacaaccccctgaaaggagaaactgccaaccccatttgcaccagggaggaaattgatgctcttgaagtttcaccagatagaaaatagtggagctggaattcgaacctaagtgcttgattctgaggcccagtttctgatcacgacagtgcaggagcaggtagggtttggtgggatctgaggatggagattgcttcttcccaggaggatcatgtaagcctgcatagagaaggggcacgttaaacctaaattctatcttctaaccttgaagatagaatatggacttgtacagactagcgctccatgaataagaaataagagctcaggagtgccagggcctcaaaggaggagcaggtagagtttggtgggatctgaagacagagattgcgttttcccaggaggatcatgtaagcctctgtggagaaggggcatgtgaacaggccttgaaggtagaatatggacttgtacagactaacatcccataaatgagaaataagagctcacgagtgccagggcacaaggagcagtactgtgttagtatgtgctgctgggtgctagggatatactgcacccagtgttgatggcacagggtctcaggactggatcagacatgatcccagcccagtagtttacatggggtcaggtaggtcctaactaaatccacaaaggagagagtggcaaattaatcttttgccttgactgtagccacttgtaaataaaaatacgaaggtaccctgtagtcccagttactcaggaggaggctgaagtgggaggatcacttgagcccaggaggtcgaggctgcagtgagctgtgatcatgccactgcactccagcctgggcaacagagcgagaccctgtctttaaaaggaattgttttttaaactatgaagacgtttttcttccctgctgtgaaaacaagatttgtggaatttgaataaacttgtcaaatataaacctagtctggcagggcctttcttcaccaaaaaaaaaaaaaaaaaatgactcagacaaaaacagaagaggcgaggactgagataaagaaaaagacagaaacctgaccaccattgtcacctgttacaaacaccagccactttggtcatcggtgctaaggccaagccatgtgctaatttctaattctgatgctttcatgtagacaaatctagtcacccaaggcagaaacgggaagccatctgagacactggccatttccacatcacgttaagcaccaagtcttatcactattggcaaattgaaaacaaaaaagattccatttttttcctatgtattcagacttctctgccactgttcggcccccgtatttctgagtgacatggcctccttagtaattttcttgcttctagtttatttccctcttactccaacctctctgcttctgccgagtaggcttccacaaatgtaaagcaatttccacctcctgttgaaagcccttcagcagcttctcactgcacagaaggtagattttatacataacctacgaggccctttgtgacctcactcctgcctgctgtccaagctcctcttcacccactacccctggattccagcactcctctggtgcccattgtgtgccctgctgtttcacagcatcatacaccgtgtgactcactgtaagcttcccaagaaagccttttgtacagtcagggttctctagagggacaggactaatagcatagaatatgaaagcaagtttattaaggagaattgactcacacgatcacaaggtgaagtcccacaataagctgtttgcaagctgaagagcaaggaagccagtccaagtcccaaaacctcaaaagtagggaagccgacagtgcagccgtctgtggccaaagacccgagagcccctgtcaaaccactggtgtaagcctgagtttgaaagctgaagaacttggagtcccatgttcaaaggcaggaagcatccagcacaggagaaagatgaaggccagaagactcagccagtctagtccttccacgttcctctgcctgcttttattctagcctcgctggcagctgatggtgcccacctggattgagggtgtgtctgcctctcacagtccactgactcaaatgttaatctcctttggcaacaccctcacagacacacccaggaacaatactttgcatctttcaatccaatcaatttgacactcaatattaaccatcacacctttccttcttgtgtccacctggaggccccagctctagcctcatcctccctgggaagctaccactggcatccccagtcccggggcttctggacctaatacctcagcccacaccatgacctggcacagccacaatacagcagctgggctgatgcttcctagataaatgagcgccttttgtcctttgcttttctttcctgtgcctaccctcgtctccccaccactatcacctatggcccctcccggcatcacgatcatttgcccagagttgcctcccatctgacagcctccgagaaagaagtccaggcaagcatgaagctctgaaggcacacacattccctccctctcattgggggtcaccttaatttgccaacactgattagtgtcaccacccacaagtgatagtaagggaggcattagcaggagcaccagtgacacttcttggcatcagctggggataacgctaccttgaaaagtgagcctgttgacacccaggaattgaatttccagatcctgctggggaaccatgcagagagcttctcacaaattctggaagccccaggtgagatgtgctactcgtcccatcagctgaaacctattcaactccgcagattctcaatgtgcaccagcaaggtgctaggtgtcaggtccccagctcctgctctcttggaacttccactcagagatgatgggatgtcaaccaagtagtgttgccaagaggactcaaaggaaaactcatgtgtgggatgttaataactactaatgaaagtgggtctttatttaaacatttaggaactactgcataaaaaatgaatggttttctttaatcttgagcttcttggaaccttgaaaatgacagtgattgccatgaagctcaacaagaagggtccagtttgcagccttctcctcctaacatgctgacacagaacccctgtgctgaggcagacccaccctcaatccaggtgggcaccatctggattccaaagaatccacatctttggatagcatttcaccaaatagactatagcaaatgttttaggccaggcacagtggctcacgcctgtaattccagcactttgggaggctgaggcaggcagatcacctgaagtcaggagttcatgaccagcctggccaatatggtgaaaccccatctctactaaaaatataaaaattagcgaggcatggaggaaggtgcctgtaatcccaggtattcgggaggctgaagcaagagaatcgctggaacccaggaggcggaggttgcagtgagccgagagtgtgccattgcactgcacactgcagcctgtgcggcaagaatgaaattctgtctaataaaaaaaaaaaaagaaagaaagaaggaaatgttacagattatttcaatgcagaatcccagtgcaccaattacagagcgggcccagagaggctaaagctggtgataggtggatttctgagacagcctctcagcaaatgggtgcagaagtagggtgttgggaggatatcatctgagctcagccaagaggcggaaagcattccagacctgtgtaacaacttgcacaaaagcttggaggtctgaaacactgccacagcactggagaactgcacatcattctgtatcgttggagtgtgaaatattaaggggtgcagagcagaagagaaaatgaacaccctgcaggggacagaccagaaagacctttgaaaccacctaaggggtttgagcttagctgttgctttgttgtatctgtttgcttagtggctaatgacattctttcatctgttctttcctccattcactccagcagcatttagtgagcatgtgtgcggtgcccagctctacagaaggaaggagtgcagggaggattcaggggaggctggagacccggcaggggccggaatctgtaagctccgcagatccacacagctcccttgaaagccattctgttccttgtgcccacgggggaggaagtgacccacggtgttcagacatctttgggcctgggatggagagatgaggccaccacagcctgtcacctcagccagagtcaaattaatgacatggatcattgtcactgagggcatgaccttttgaaataattgaaaggaaaccttgcctgagagaggagtcctaggaagacagaagtgaaaacaaagctggagatagacagtgctggcagcacccacctctgatgccctcagcccagccatgtggggatgacaggaatacatagctgctaaggcgagtgatttacggagcacataccaggagggtccagggtggtggcaagatgcaagccatgagccagggcagatcacctacccaggcagatgctacctgcaaacacaaatgtgggcacagagaggccagtggaggtgaaaaatctccttccctgctacccaggtgagtgccggcagagccacacggcggtcagccatggcctctccatcagctccctaatgagcttccagccagacaagctgaaaataacaggaccagaccaagtgagagctgggtcccgtcaggtcttcagcacatgcagccaacgtgcccagccgaacagcaggcgccaccagttcctttctgtcaatgcaacaacctccaggtgggggggcccttctcccacctcccatgtgtgaactgagaccccagaccctcaccctgtgcccagcaaccccaaggcacagagaattttgtctgtgtctcctgatttcaagggagaggcaataagctttgatcccttagtgcctctgggatttgagggttacctaacaggcagaaagaagtgaaagacccagcaagtaagagcggggcagctggtgattcccagagtgggttccaggagcacaggcctggagatgttccctccaaacaggcttccctgttgacagtaacactgcgcatgtcacattcattcatgagaagagttctgagccaaggaaacaggagacactcagaccctgaggggtggagggatgcggtacatccaagaagttctgacccatcaaagagttgctagaagggcccaagagtgtctcacaccctccacttgtctaactggcttccacccctcccacaccagcaagtacccttttcctggtagaaaaaaaaaaagcaattgagacgatgcagttcactgaggcttactggaaatgcataacaagggtttgtcctcctaggttgctgatcaggactaaatgttgctgtcccaagagcaataggttctctatactacaagttctgcttatgtgatgtctcagactggggttaaccacctcagctaattagtagaaaggcttccagccacctacacatgacctgtgatcctggaaggagaaaaacgtctgctgctgaaccaaagctccttcacccttctcattgccaaaaaacagcttcgcagtcacatgggaaatgtctctttggacttaggaacaatggcctccagcagcattttggaatctcacccatcagtaactagaggagcttctataaatctttgtagtgagaaaagttattgtagcttcagaattggatagctaggttggaagctgcagtttggccacaactggctgtgtgacctgggggcaagttcctctccaagcctgttttctcatctgcacagtaggaccatagctggagtttactgattcctgttccattgctctgtgcttaccagagctcatatatcttctcttccattttgctcctatgtttactatttttgctcctgcgatgtattgataactggccaccacataccggttccaaagagaatatttgtgtgagggttactgttggcctcatctggcaaagctttacaaggctccccactaggctgcaggtcttgtctcctccctggtcaccaatacaggacatggtcacctgtgcataagacattgggctgtgggtgaggcaggcagagaagccatgtcccagaggctgtgcatgacgactggccagatgcttctgtctggtttgggtggttttcttccttccctcacaggacagctggggtagaccatagatcccaaacctccctacgcagatttcatcctgaaacatttgctttccaagtaaagccttaacattcaagaagacagccctcagctcagagctggctctctgcctgaatttcctgttctctccctgtcggttttctgagatccacggcagttattctcaaaaaacctctgattgttcattcttctctccacgcaagttctgtggttctaaaaggggtttgggaattggcagcacggtgatacactaattcctgatggccagaccaagtcacctgctaggtttgatcagaagagctccacctcccatcccagcgccccagggtctccatggcatctgggcatctttttcctcttgtgccctagtttcactcttggaaacctcctctccataagttagacctaagcctgtcagtgtatccctgctttggaccacagaaatttgctcagcagtggacgtatcacgcaaccagagcccgtgcgacataatgaccttgtgctgatacatatgatggaattttaataaggggtagcagctgccctgccttgcccttagagcatctccttaaaagcacaacaggtaggccagaccctagagtcaggagttagattttacaatgcaaggtctccagtctccagatttcacaacacaaggtcacaggccttctgaccctgggactgtaggcacaggcctcggaaattgactcagcggtctctcgggaggtgtgcagaaggctgttacaaggcacatccattcgtctctcaaggagggaagagtgggcttcatttttcttctactttgctgtagaaagtgtgtgaaattcagcccagattgtgtagagtctcctgcaggctcctcgcatgtgtgtatctaatatgcatattcaggaataaatcacgtttcctgcctcatctatatgggtatgaggggagaggagtctttttgttggcaagactttttatttctccaacagccccgttgctggaaatgctggcattgagtctctcactctcctccagatttaaagctggagaaacgtgctgcagccatttctctgcccttagggaagaggctgcctgagaacaaggccaactccaaggaactgggccaacaacctgggaagaaggaagaggatcgggatgacttaaccccaatccctgggtccagccgtgcctgtctctggattttgccattgtacaagctgaaatgttcccttttcacttaagtaaattgggtacagtttcctagctcttgcaagagaaagcaccctcactggcttaatgcccaagtataagcatcttaaatgcttgtctaaatcttgaaacgcagctgtggtgtaatatacttctgagtcagaagggctatttaggcacagcctttcgctcttgccagagccccttacatgacgctgtcactggatagtggctcagcccatgcgtgctcacacccagtgtggaaattcgctgccgctaaggcaacccactctctctccacacagctctacctaccaagaggcccttactcatcccccactccaatgcttctccctcaagccattggttggccccccagagaacaagtgtggaccttttttccttaagggccctctcaatcaaagtcagctgtcatgtctctgcaagacagtatgctcccctctaggctcaatttcttgtcacttatgcgcctgatacacagtcatttcctacttaaaatcaaatcaataagtgagtagtgcttcctttaatgagggctaaagaacagaaatccagttttacctcattatggagctgatggcctcagcatcctacaagcgcatcagaactctgcctggcttctcgacaggcaattacctggaacaccaggttcaaggatggagtggaagatgatggaagagtgtgtttttgtgaggaggccagaagacactcatattcgttacagccccaggcacagagaggttctccggtccagtcctgcaggtgaactaaagatgcctccaggggctgtgctgaaaatggaccagcttgggcccagcttctctgtgcctcttcctagtaaagaggaagaagaaatcaaaaggtgttaactgatggagaacacaagctttggagtcagggaggctctatttactttccaactctgcctcttcctgtttgaactggagcgagatacttccctgtatcctcttcctcagcagggaaaatgaccacctgtctcaggtgtgtagatatctaagtcctcagacccatatgtgaggacatactagtggcagttgttacaataatatgattatggccaggcatgctggctcatgcctgtaatcccagcacttcggcaggccaaggcgggctgatcatttgagtccaggagttagagaccagcctggccaacatggtgaaacctctgtctctactgaaaatacaaaaattagccaggcatggtggtacatgcctgtaatcccagctactagggaggcttgggcggagagtctcttgaacccgggaggcagagcttccagtgagatcacgccactacactctggcctgggtgacagagtgagactccgtctcaaaaaaaaataataatttttaaaaatttacaattatttctgactttttgaagcttctggcctagtggtgtcccccttgtcgagtgagtctgctggttcccctgtgaatgaagtgctactggcaattcaaacggcttgcctgccgaagctctttacgtccctccaaagtcacatgctgatcagattattttattaaagaacagagttattgcaaaggagtgcagctattcacagaacacaggaaagcaagcagccggaccccagcttctcccttagttggcttgaaagttcgagtgccagtcttcctcccagcggggtgcactgtgtgggggcccaagaagcgtcctgccaggaagtgagaactgcaggtgagttcctgggagctgaggctttggggagctctggctcttcctgcctcactgtccacaatccttgggctaattctggatggcagagtagggtcaagaatgctagcatcaaaccttccctaatgtgggcagttgaagggaggtcaggagtgacaggaagtgaagtcagcaatgctgagcatcacctaggcaagaaacagggaggccttgtagaaactgtttggtgctgcaaacctgtgccccactgaggcattatggctcctcctccacgtggagtgtcttctctgagagtgcctcaaggtgcgaggggcagtgggaagattgcagagtcccaggtctgctgcttattaacctcgagacttcagcagtcaccgcacagcttccagacctcgggtgcccacttgtgaaatgggaaagctgggctaggccagtcattcacattttgtggctatcggccaggtccctggtgcccaggcatgcagccacctgccgagggtgagctggcacacaggcagcacctgtttctgtacctgacagggagtgtctcaacagcagatgactccaaagtcaaggcccgtagagtcaactcagattttgatatgactgctcggtccccagagcactttagaagagtgatttggataggtctatggatggacaaatgaaaatatctgagaaagatgctacttcatggggtcctttcctttgaagtgatcagaaatagcatagaaggctgggtgcggtggctcatgcctataatcccagcactttgggaggtcgaggcaggtgaatcacatgaggtcaggagtttgagaccagcctggccaacatggctaaaccttgtctctattaaaaatacaaaaattagctgggtgtggtgatgggcacctgtagttccagctactcgggaggctgaggcaggagaattgcttgaacctgggagatggcagttgcagtgatctgagatcacaccattgcactccagcctgggtgacagagcaagactctgtctcaagaaatagcatagaaggctttagcaggaccattgataacagcaatacctctgttttgaagagtataaccataatggaggcttccaggactgaagctgaagaagagctttccaacaccagttgatagactactgggtaatgtcatagttaatgttgctagagtggccattaaaataacataattatgctaagtagtttgaaaaaaaggagagagagagtacaatggaacacacttgtgacatgaactctgggtaattgtgctgagataatttatgccaataactcctcgcaaacccccgtcaagttgaatgactgtctgctgagggtctcgcccattaggtaatttgatggctggtttaaaaagaaaagtgataggataggattgtgtctgggctaaatacaaggtgaggctgaagggggcaaagtgcaaaacaccaatcagctgtgttctcatgtcagatcaggcctggctaacacattttggaactgttatagaacgaggatctacccctgcggttttctagaacatagcttgggttttctcctggtcacctcaagttcttcccttcaaaatcaaatgccttagaggtgccacaagggctgactggttcaatgagttgtgcagactgttccatgggcagctttttctcccttagtatatcaagagaattctcacagtgaactattttgtacaggggataactttcattaagaaaagcacatagtccagcattttgggaggccaaagttagagaattgcttgaagctaggagtttgagaccagcctgaacaacatagtgagacctccatctctacaaaactttttttttaagccaggcatgctggtgtacccctgtagtcccagctactttggaggctgagtcaggaagatcccttaggcccaggagttgaagactgcaatgagctatgattgtgccactgcactccagcctgggtgacagagcaagactgtatatatagatttatacatttttttgagatatggtatatatatacacacatatatatatatatatatatacacacacacacacacacacaaaatataaagattcgtttgtatgaaaaaaatgccagaataacatacagggaaatggtaagaatgtttatctttgggtaagatttttggtagtttttctgtgtacttttctgtgctttcaaggttcattatgtttgaattagaaaagctatttaaaatgtcatctttcttgaagttttctacacttaatctctatcataactctatcttctcccacaactgtgaagagtttaattctcaataaaagaaaaatattagatcttaaatgatcttcccttgttccaccctcaaatcaatcactgatcaatttcccagctccttctcaagttcagtaaataaaaggaaactgtccaaaggtaaagtgcccgccatctgcatcaacagcctttactgctggaatgttccaccctttcactagtctaccctctcattgtgttccttcctcccccaggaagtgccagttcctcagcacagccctgcagcatttcctggcagctctgccagcctccttacctcacactgctatgagagccacaccatttctcatcgatactgctttctacccacccactcaactcagcagtgagctctctcttccaggaaaaaccatctcatccaagtaagtagtgagggcaaatgacaaatacacccttttccttaaagaatgtgattcacacgggtcatcacgctgagcatcatcgactcctggaatgcaatagtgatggtggtagctggaaggatggtattaagacttacctttggccctctgcctcctggttttcttacactataatctttataatccataatatcctgtccatcaaacaacctgcaacccttttctaagaatctgaaagtcacttctctggccgggcgcggtgtctcacgcctgtaatactagcactttgggaggctgaggtgggcagatcatttgaggtcggagttccagaccagccttgccaatatggtgaaacgctgtctctactaaaaatacaaaaattagccaggcatagtggtgggcgcctgtaatcccagctactcgggggactaaggcatgagaatcgattgaatccgggaggcagatgctgcagtgagccaagatcgagccactgtaatccagcctgggcaacagagtgagactcggcctcaaaaaataaaaataaaataaaaagtgacttctctgcttcttccaaagcaagagagagtccccactggtcactggataaacttgtgtgtttccgagcgttttggatcagatttattggcacttactggaagcaaaaaagagcctggagatagctctattttatttccatgatacctagtccccagttatatgacaactctagactgagcccagcatgtagaagccagaaactcattgaggtttttttatccaaattatttgctataaacatgagcttcctttaggccagagattcacaaatttggcttcacattagaattggttgggggctataaaaaatctccatgcccaggttgtttccatcccatttaaatcggtttaaacaacgattaatgcctggaggtgggtccaggcatagtttttaaagcttagcagttgattgcaacgtctaccaagtttgaaacactggcccgaggctgtggttttcaatgatgcctgaacattggaatcacctggagatgttttaaaagttctgactggcaggaatgcctgagactaattaagtagcaggctctgggagtggatcaggtgtcagtggtttttgaagatcctcagatgatgctaatgagcaaacaaatttgagaaccgctcccctagacaaatcccttcatgaaaagcacaaggaaacctcttggtggtgtccctcacttcctgaaaatagtaaaattggctccttccctcagactaccttccctgcctattagcaaatgtccattcttcccattgagcccattgaacttacttcctccagagcaattcatattcaatgtcgtccactctcaccttctgcaagtaaataacttcccatcccacatggctctgcctctctctatggctctgtaattcctgcaatctttcctggcaactggactgtttttggcaaacacacagacagatacacagcctagagagaatgtcacactttgacacttgagacttgttcatcttggaaaggtgcaataaatatctgacaataatgtaaaggaagaacacgtgctaaatatatatatccttacctgggcaggcagcagagtgaagaagggggcggggaaagggggcttcaattggataggtaatattttattcttgaaaatctgaagcaaaatttaacaaactgttagcatttgttaaatttgaatggtaggttcatgggtgtttatcattcttgtgcttttttgtatgcttgaaatatttcattaaaaatttaagagtctggtcgggcacagtggctcacacctatcatcccagcactttgggaagctgaggtgggtggatcacctgaggtcaggagttcgagaccagcatggccaacatggtgaaaccccatctctactaaaaaaacaaaaattagccaggcatggtggtgggcacctgtaatcccagctactcgggaggctgaggcaggagaatcacttgaaactgggaggcagaagttgcagtgagctgagatcatgccattgcactccagcctgggcaacagagcaagattctgtctcaaaaaaaaaaaattaagaatcataaaaatgttttctaaaagctgttctctctatacacagaggatatttatcctacacaccagttacagacaatagaagcaagtttactgtttcaattttcaacagcgttgggatttgtttttgtttttagtgagttgagtggttctagattggcattgaacaatgtggtagccactgttcatgtgtgtggctgtttgaattaacactaaaataacatgtaaaattcatttattcagatgcactagccatgtttcaactgctcaatactggcacggattgtagaacatttccttcattacagacagttctattggatagctctggtctagataatacataattacgtaacaagatgcaaatgacttttctacaattagtctcctgcttccctttgtattggcttgaactaaagccatctgtgacttagaagttatgagtgacacaagtaaataaatggtaagtctattgtttttagtctttctggaaaacatttactaaactcaaaatcactgaacccacatatcaagaactgcacatttatagcacttttgtgtatagatggatatctagggctaatatacaaagccttgaccactgacaaatactgggaagtagctgtctaatattaattaataggcgggaccaactgatgttcaaagttgtcagtaggtcagttcaaatagtaggtcaggaagaatgtctgcccagatagtcaggacaatataatttcaagcttttcaaattaccaaacgaaacaggttgctacagcaggtaaaataacactaaatctgtggaaagaaaagccctacttcccacctgcccccaaccctgcgctcctgctccattctaacagcacagccacgcacgttcacactctgctcatgccaacgtagtaaagcagcaatatagacatacagggcatttttgttttttaccaaagagaactatgttacacacttcgccatttgagctttttcacttagcaatatgtcatagtagacctccttatgcgtctgtagatatgaatagaactttttccccaatctctttctgcatatgcattgaaattcatacacatatattccacatacatagatatatatttctgaacatatacttatatatgtacacattatataattttataaaattatacagtatagttttttgtaatttttataattttcttgtaaaattagtctgtataagcatatattcataaatatattcatatatatatgaatataccattcataaatatattcatatatatacacatatatatacacacacatatatatacatatacatatatatatatatatacacacacacacatatatatatatatatacacacaccaatataccattcatgccgggcaggggcaggaggcaggcagcggtgttttcatgcattttctgtgatagctagcttgcgtcttttgtacctactctcttccctggcccttcccccaccagaaccatctcaatcccagatcatttacgttagcaagatctagtttcttccacatgttttccatataaatacgatcatatacctattcatataatcacaaacaatgactttttttttttgagacagagtctcgctctgttgcccaggctggagtgcaatgctgcgatctcagctcactgcaacctctgcctcccaggttcaagcaattctcctgcctcagcctcctgagtagctgggactacaagcatgcgccaccagctaatttttgtatttttagtagagatgaggtttcaccatgttggccatgctggtctcgaactcccgacttcatgatccactcacctcggcctcccaaagggctgggattacaggcatgagccattgcacctggcctacaacaacttcttattgttccctttatgtcattgtcacttagtttgggaccactgtaatttcaccaaagcaaacatcttttttttttttttttttttgagatggagtctcactctgtcgtccaggctggagtgcagtggcacaatctctgcacactgcaagcttcgcctcccaggttaacgccattctcctgcctcagcctcccaagtagctgaggctacaggtgcccgccaccacacctggctaattttttgtatttttagtagagacggggtttcgctgtgttagccaggatggtctcgatctcctgacctcgtgatctgcccgcctcagcctcccaaagtgctgggattacaggcgtgagccaccacgcccggccacaaacatctttttacattcatattgggggaaatttggccagatatcaggcaaaattcacccccaatatttcacgtagtttcttttctattttccctaagcattggatggtttgagaaataaagagacagagtacaaaagagagaaattttaaagctgtgcatccagctgagacatcacatgtcggtaggttctgtgacgccccctgagccgtaaaaccagcaagtttttattagggattttcaaaaggggagggagtgtatgaatagggtgtgggtcacagagatcacgtgcttcacaaggtaatagaatatcacaaggcaaatggaggcagggcgagatcacaggaccacaggaccacaggactggggcaaaattaaaattgctaatgaagtttcaggcaccattgtcattgataacatcttatcaggagacagggtctgaccaaaaatttattaggtgggaatttccttgtcctaataagcctgggagtgctatgagagactggggcttatttcatccctacagtttcgaccatagaagacggccacacccaagggggccattttagaggcccaccctcagaggtgcattctctttctcagggatgttccttgctgagaaaaggaattcagtgatatttctcccatttgcttttgaaagaagagaaatatggctctgttccacccggctcaccggcagtcagagtttatctctcttgttccctaaacattgctgttatcctgttcttttttcaaggtgcccatatttcatattgttcaaacacacatgctctacaatttgtgcagttaacgcgatcatcacggggtcctgaggtgacatacatcctcctcagtttacgagatgacaggattaagagattaaagtaaagacaggcataggaaatcacaagggtattgattggggaagtgataagtgtccatgaaatcttcacaatttacgttcagagactgcagtaaagacaggcataagaaattataaaagtattaattcggggaaatgtccatgaaatcttcacaatccatgttcttctgccatggcttcagccggtccctccgttcggggtccctgacttcccacaacacattcacttttccagacttctgtttttatttctatggagagtgtcagaagaggaactgctgggccaatgggagtttatttttctttgtttttggaaaacagtctggagaagtgcattaaaactttctcctatttatgccagcaatgtgcaagagtatcattctctcacacttgttcaacagcaaaagatgctgttactcttggaagttctgcccatctgatggatgtaaagtgacacctcattgccattgtgttgactttgacaatgacaagatctcatacctactcatctattaggcactcagattcacttttttctaatgagggtatttcacctacattttttcctacagttttgtccttttcttgtcaatttataagatctctctatgtatgttatagataccaactcttcattgggcttagaatttttattttacaaatctattttcatctgatttgactagtatcttttgaaattcaagattttaaaaaatacaaataggcctatcttttctgctataggttctgtttgttttgttttttgtttgtttggtttttttgagatggagtctcactctgtcacccaggctggagggcagtggcgccatctcggctcactacaacctccacctcctgggttcaagcaattctctgcctcagcctcccgagtagctgggattacaggcatcctctgccacgcccagctaattttttttttattttatttttagtagagatgaggtttcaccatgttggccagactggtcttgaactcctgacttcaggtgatccactggcctcagcctcccaaagtgctgggattacaggtgtgagccaccatgcctggcctctgctataggttttaagtgtcctttcatgattaagaaggtcctctccccatttaaactacatgtacagttcctaaaatttttccttaaaaattttttttacatgcatctttaatcccactagagtttatttttaagcatgataggagctggggtccatctctgttttcttccaaatgaatagtaggcgttgccagcactgtttattaaataaaccaatcttctcccactgaattgaatcctgtctttcttgtattaaattcttgtagcttgaaatctcattcttgatagtctattttgtccactgacccatctgtcctcatgccaatgtcatattaactacaataattacactgtagtttctcaaatctttattcttctgtttcatactttccttggatatttttggatatttattttatataagctttatgatcattttatcctaaacaaattggatcaaaacaaaatgctgtatagagtctaattggaagtttattattaataaatgtatgttaatttgaggaaaagacttttttttttaagtgaaagcaaagcaagcttattagaacaacagaatacagaaaaatgtctgctccatagacagggcagggtaccccacaggcagagtacctggaaaattttttttttttttgagacagagtctcgctctgttgcccaggctggagtgcagtggcatgatcttggcccattgcaacctctgtctcctgggttcaagcaattctcctgccttagcctcctgtgtagctgagattacagccacccaccaccaagcccagctaatttttgtatttttagtagagacagggtttcaccatgttgcccaggctggtctcgaacctctgacctcaagtgatctgccctcctcacctgaggtcaggagttcaagaccagcctgaccaacatggtgaaaccccatctctacaaagaatacaaaaaattagccaggcgtggtggtgggtgcctgtaatccgaactactagggaggctaaggcaggagaatcgcttgaacctgggagacagagattgtggtgagccgagatcatgccactgcactccagcctgggcgacagagtaagactgcctctaaataaataaataaataaataaataaataaataaataaataaataaaatatactcctctattttaattatttcctatttatattagggatagcttttccacatctattgttgtctttatttttccttctttgttcatttaatagacagtgttgataccaccttgcattcctagaataaatctcaaagtttattattcttttgcagcattattagacttcttttactagtattttatttagaaaatttcattaattcagtaaatgatactgatttttttgatatttaatgtcaggttttaatattaaatttacattaaactcacaaaatgaattgttggagcattctatagaatgctatggattgaatatttgtcgcctccaaaatttatgttgaaagttaatccccagtgtggcagtattgacagctggggccttaaagaggtgattaggtccattcacaaagtaatgaattaatgggttatcacagaagtagattaagtggttttataagaggatagacgccagggctagcatgctcagccccctcatcaggtgaccaggtgatgccctgtaccaccttgggactctgctgagagtccccagcagcaagaaggccctcaccaaatgcagccccttcacccttgaacttcttagcctgccatggacatcacctgggaaagtgttagaacacagaatctcaggccctattccagacctacagaatcggaatatgcatcattaacaagatctccaggtaaattgcacgcacagtaaaattggaaaagctctgacctgaacgagctggtagtttaaattggaattatcttttctttaatgtgtcatatagaactcagctatgaagtcattcagtcatggtaactttttatacttaatctatgctaattggtatgtttaagttttctacttcttgggctaattttggcattttatattttcgctaagaagtcatctgtatcccctggtttttacaactttgttactatggagttgcatgtttttattattttaatttcttccatcaagtgaggatggctggctcttcattttatatatttttgctttgcctcatttttctcgttatcaagctttacaaaaagccttatatattttcttgatcatttcaaagaaccagcttttacagccaattagtagtaattcttcaaagctaacaggagggggacactacaatgtgaaccactgtcatggatgaattcagctttgctttccattaacatcaaaactatgtacacatgcaaatctgaacttccaggggccaaagtattatgagaatgcaggattaataccaacctttgattcagaatcgcattctgagtagggtctacctccacctaagtggcctttctgtatacctaatcacattctaaatgccatttactgcctcgttaaataatgctttgagcatttgtatcttgttttacagttgatataccttttctacccactatttcatttgaaatttatatttaaaatggtataatagataatccgttactaagaggaacactgcctctaacctgattttcatgtactgagatcaactggggccccaggaatgccttgtctctccaaagggctgaaagggaccacagcagagtgtgtcttgaggagagagctaagaaagcaagtattccctcagataaagcaagaggcacgagttaaaattttagccatgccccaatgcaggaaatggcagatttcagatactcaatctagacaggcctattttgtgaaatgcattagctctcctctcccttccattaagaaaccaaggttttgtttgcccttttaaaaatgtatgaaaacctattacttagatactttgatttcttacctttgcaaatattctaataaaataaggatttcaaaagccagatgacggttaagtttttgcactcaaattgatccaagtttgggataatagctgcaaaaatataaagtgtagtttattgaatttaggattttcacttcactgatagaccagtcttaggttgatcattatggaagagttattacagagatattgctgaagccctccacaaagttaactttaatcttgtgccacagaccagagatttccgatctataataatctatttcataagcactcacagaagcaagcaattgaatagtcttccttttgtggtgtatttaggtcttctttaagtatctggactaaaaaccatcttaacttcatgttcctggcagtactgtgtttgggacattgttaaactccaataaatagtgctgagtactgaaaaggagaaaatcatcctgaatccttcctcagaagagaattgatcagttcacctgcttgataatatttttcctctctaatcaaaatgttcccctcctaaatcccaggatggaaaatgagtaagacagataaaatggtaaaattaaatgaaatgacatccattgcatttacaagttttgaaaataaaatactaaaggacagactttttgacactgaagtcttacataggcagaacattcattacgaaacaaacataactaaagtaaaatctcagtttttaagatcctgaattcattatttatgcttttcaactttttcttatggggatggtttaaatttaaatccaaaatatactgtaatatctcctctgacctcaagtcctggaaagataaaatacactgatttttgttgttgttgttgttagacctgatgtttccaaaatactctttggaaaatcttcctttcaaatgccactcagaaattcatttttttttttttttttcatttggagcatgcaactccatggctcagtagttgccatgggcctcagccttcagtctggcggtggaggggagacaaaccaggaacgtgagctttacaaaagaggttaatataaataccacaatggatatttcctggttattttggaaaaacttactgagaaagggcctgtgagaaaaggaaggcttcctgcagggcactgcacctaagcagataggcaggcagtggatgaaatagctaaaataaagataagaagggacagcttgggaaaagactgaaagaaaactacaaagaatataggttacaagaaaattctgttactagagcaaggggtttaccgatgggatgcaggtgaggacttgtataaggagttttgacatataccttgacacatactaatgtgctacttcctaaaacaaccctgagcgggtattatttttcagatgaaggaagaggaatggattgagtaatttatgtcaggtcacacatctaggaaatggcagagccagtactggaatccaaaaccaatgtcatattcttaacctccacactacttggcagctacatggaggacaaattttatggggacagaattgggggaaagatctatctggaattttactgcagtagactaggcaagacttaacaaggcctcaattaaaacactacagtataaaatggggatcagactataggctctggactcgagactccctcagctaaaataaaagttttggctcaacaaacctaacaggtatggttgtagaaaagaaactttggtgtgcctcagtttccccatctgtaaactagaaatagcaacactacctgacattaacctcagattttacagattaagagagaccatatacctaatgtacacttagcctagtggtcagtaatgggtgctcaaaaagttggccattattagaatgctacagatgacagatacagtaatggtcttgttaagagtaaattagcaggccggacgcagtgactcaggcctgtaatcccagcattttgggaggccgaggcaggtggattccctgagctcaggagtttgagaccagcctgggcaacacggtgacaccccgtctctacaaaaatacaacatattaaccaggtgtggcatcgtgtgcctgcaatcccagctacttaggaggctgacaggagaatcacttgaacctgggaggtggaggttgcagtgagccaagatcttgccattgcactgcagcctgggcaacactgagactccatctcaaaaaaaaagaaaaacaaagagtagattggcagaactaggggactgatttggggcaaagtggagaggagataatggatggaaaggaggcagggaaaactaacaggtttttcgcctggcgggtagttaacaaggtcgatggagaggcaactgactaaaatagagaagctggttcattggaaacagagatgacatcttttcctttcagacagtttgagtttaaggtgtcaacaggacatccaaacatatatgcccagtaagcacatgaatatgaaactcagggaagtggttgtggggagtcaccagcaaataggtggtgataaagtgtgttagaacagtgggctaaggataacagtccataaaatataaacattattttgggttaatatacaaaatgcaatgaaattcaaacgacatgaaaatacagaaaatgaaatttagtactgtgagaatgaagaattacttctgatatttaaatagtatgttcctacagtttagaaaaatgagggtactaaagcacattttgatccagtcaggacaaatgccctctatacactcagattgagtcaaagtttttacaaaggtatgctcagaaagaccaaagaaaatttgatgttatctttaacaaataatgcaacattttcaaaaaggccatttttataacactttttaaagcataatgaaaacacttggctctcaagattgtcccaagaattatccccaataaaatgcagtaggttaatgatctgatgtcagggtgctagctggtcaggtttattctgtaagtaattttctcctactatctaggattttgttttcacagaatggtaaaaatgttaacacaggtctgccgtatccattcagcaaaacagcatgaagtgacttgacttgtcctgtcacttgtggaacaaagccttctttaaaaactaaatggtctactacaatttaacagcatcccaccatcaaactctaaatatgaaagatgaagtaagcagccaccaaatatagcaattccggcactaagtgagtacctagagacctgcaaacttcctacttctgtcctccactgccatgtagaatttcaaggtatcacttcagggtgggaggtgatataggttatcagtatttctctatagggagggggtgctgttgacatttttggcagcacaggttttttagtgtgtggacctgtgttcccctcacaactcaatgtttcacattccaactctgccaccaacccttcctccaacccccaatccgaagagtgcctccactatctagagacacagaatataaaatacttctgtgtcccaccaattatcacacatgctaatttcatttctagaatggtaaaaatgaagcaaagactagtatctactcataagcatagaaagtttgacattttcttttttctgtcaacacctagctattaacatcaaaggctggaatcctggatggtcagttccctttgggcagacccaacctaaccatttttgccattttaaaaaagtgtacatgagattatcaggtagactcagtaaagcacgactggtccacctctaaacagcaaagacaaacacatcaaaaagtgactgtgattctcaaaggacaaagcccactcccaactcccaggggaaaatggaccttagtcttgtttcacctgtgtaattggaggcagaataggatgtgaattccgatgtgctctgcgtctggttccacaccatcttacagtgaaaagtgctgagtgactgtaaacccaacaggaaaaaacattcaaagtgtcatcactacagaaacaaacccagcaggaccacttctgcatgcaggcagtattaggtctcagatgctccctttctgcctcctgatagagtggatgcaggaactttggggacatgatgaaccacacacaaaatgaacgaaatggcagagcactctcattttggaaagtttctctcaggtaatatcccatcactgcctattaagactaaaggattaagtactaatttacactcataagggactaataaaatttcctggcctgtcacttaaggagaaaaaccagcagaccagacgtgaagataaaccctcagagctactaatgcctcattcaggactctttcccacagattagtgttgagattatcacacggcttacacagtagggaggaaatgcatagccaggactcttaccaagtccggtaaataaggaatacctagatactactgtttctgtcaatgccatagacacttagatgacccgttaattttacttcatcccaacaatgaccgtgcagaatctgcgtccctgacgcaaagcaggaagcaaatatttgggcaagaaaataaagtcagttacagatttcacaagtatcttgtacaccagtctgtaatttttaattagaattagctaaaagacattgtacctttcgcgtgtatgactgagcataacagtgcttaacagtgtctttattaagtgaatgcctgaaagtattcaacattaaattcaatttatttcacattaatgtttgcaaatacatcatcaattcttacatatttcaaatcaacttcaagtacagaaggcttcctctcaaataagtctcctgaggtgacataaagactgaaagaagcctatgacttgagtccaagtctcttaaccaacaatcaccatatcgtcactggtgaactcatacgtggggacttcaaggttgagaggagcaggacccaatctgatcctgccagatgcatcatagtgtgacccatggcaagggcagtaataaccaccaaaatctcctgcatttgcaatgggtacacagccaagatgagtgcaaacacctatcaggataacccattcaggtttctttactcgatctagatcatgctgtgggtccctcaactgtgataattcaactgcagcttcctgctcaatttccttctgggttctatgacgcacaaacaggggtttgcctctccatttgaaagccatgttcttgccttctggaatatcggataacttgatttcgattttcgccagggccaacacatcagcagaagcactcatgctggaaacgaactgggtgacggcattcttggcagcatatgcgacacccacagtagttactccagttaccaaataggagaaacctttcctagcctcgctgctttctcttgaagacttcgtactatctaaaacttcaaggcggcggtattcagagaagtcaggcaccttgatgtctgtgtgggaataacaaacagaagcagggactgcaagacaaacagaaggttaaaaaacacaattagatgagtatcccgaagggagtatatatcaggaaatagccctttatggattcacaggtaaaaaatcaaattctaaaaatgtgaaatatggcactcactgggtctcagaaatagtcaaattggcggtgctagcatataaaatcttaaaaatgaaatgaagtgaaccaccacctatcatactggtatgaaatcacaagatactatttgtaaattgagctccccctagttggttgaacattgctgattcaggattcacaacacctcagtgcatcatgctaaaaacgttaaacagcaaaataaacagtaataactcaaagtttccgaaaattcaactgccaagacttactatataaatcatgctaaatacctcccatactctctggattagaaggacaccctaaaactcatctagtccacacagtaagttgacgtgtgatcaccttattaaggcaaatgtctgccccttatagtccaatctatgttctcggaaaaaactgttaattcataaaataataatgatataataaacattctgtgaactgtataactctgctgcagaaaaattagcgtttctattttatactctagtgtataaattagtattactttaacttaaaaccactaataggcagagaaggacatccttatcagagctctcaaaataaaatgaaaactgcaaaagaactaattatttcaatttagcaagggaaaaaaagggcaaaattttcatatctccccctcttcagtaaagggcaatagttactgtaaaagtaggggtattatcttcccttttcactgctgtagttctctcaactggggcacttctagtctaggccataaaagagctcaaatgaatgttaaacaaataattactatgtagtactttgggagcaaggagtttctttggtagtttaaaaaacaaaaacaagacacagttacatccctctctccaatactatttttaaatatctgaccaaaaaaaaattttacctagtaccacttttaggtatgtttcaggaagcaaacctctttgcaaattgtatattcatcttaagaaatttgccacaaagtttcctttttaaaaaaggggacactaaaaattcctcttttagaaaatgtgtatccaaaataaagatcttttatgatgcatttttattgtaataaactgcaattctaccttgctctactaggatatcatcctaatatactgtacttccttgagtagtcaaacattacaatatggaatacctgaactgcttttcacatgattctcaaggtcaataactttatggaagccagaagtattcaaacaataatgaaacctaccaaaatcactctatgtgcttttctgactaaatcatttcctggagaagaccaggacacagataatggcaacttgagactcacatcccagaatctgtggagtcaaagtgacattacatcctatactactactctaacaaataaatgctaacctgccagtatatactggcatttggaattaagcataaattacttgctcctagcactacctgggattacagaaaagatgagcttcctccctaaaagataaaggaataaaaagttcatacttctacattaaaaacagtatccacaacccttaacagtatacaaggaaatgtacaagaaaactcaataaaatggctttgcccttctcattcagagatttggtggcaaaagtctcctcccactctatctagctggttacactttagtaggctacaccaccaagaatcctttcggaaattaaactgccctgttgcaaaaatcattctccaaatatttacatgagctgcattaggtctgactttcagtaagatgctagatttaattctaacctaaagcaaaatcaaatacttaaaggagaaaatttaaggaattttaacaaaacaagttttattttaaggttgagctccaatgcgccttggaaatctgcatgaaaatagtacaaccttcctctccaattcaagaatcttctccagatccaacccctccactcccataagccatcctgccatgaaccatctagacagactataatgtgaacttaaattacaggctgaaatgattacagaaaaggtttttgccttatggttctacattatttgcctgtttctaaaaatagtttctctaagtcaggtaaacctccaattttttttttattatactttaagttttagggtacatgtgcacaatgtgcaggttagttacatatgtatacatgtgccatgctggtgtgctgcacccattgactcatcatttagcattaggtatatctcccaatgctatccctccccctccccccaccccacaacagtccccagagtgtgatgttccccttcctgtgtccatgtgttctcattgttcaattcccacctatgagtgagaacatgcagtgtttgttttttgtccttgcgacagtttacttagaatgatgatttccaatttcatccatgtccctacaaaggacatgaactcatcattttttatggctgcatagtattccacggtgtatatgtgccacattttcttaatccggtctatcattgttggacatttggattggttccaagtctttgctattgtgaatagtgccccaataaacatacatgtaaatgtgtctttatagcagcatgatttatagtcttttgggtatatacccagtaatgggatggctgggtcaaatggtatttctagttctagatccctgaggaatctccacactgacttccacaatggttgaactagtttacagtcccaccaacagtgtaaaagtgttcctatttctccacatcctctccagcacctgttgtttcctgactttttaatgactgccattctaactggtgtgagatggtatctcattgtggtttacaggcaacctaaaaattgggagaaaatttttgcaacctactcatctgacaaagggctaatatccagaatctacaatgaactcaaacaaatttacaagaaaaaaacaaacaaccccatcaaaaagtgggcgaaggacatgaacagacacttctcaaaagaagacatttatgcagccaaaaaacacatgaaaaaatgctcagcatcactggccatcagagaaatgtaagcctccaattttttgaagaaactttagcaacacgacgaattccaaagatgcttttcttttgctattgaaatgttctccttccttccttctcacctccaggtcccaaggatgggctagggtactctacacctgccatggacagtttcttcaaaacccactgatgctccttaacaaatattcattcacaaatactttgcactaactgtatacaaaatccgacgttgtgaaagatagaaaaataaagaagatattaccttctctatgcccttaagcccaagggtggaggagttaccaataaacacaatacagagtgtaaagtgtatgtgctacagagacagacaaatcagcaaataaaaactttattcacctgatccttaactgagattgaaaagatgggtaaggaaaacatatggacatgtagcaacttagtggaaggaccatgaagaaagtgcagagcccagggtgaatgaagacagagtaaaaagaaaagtggcgggcaatttggttagcgtgtaggggaagagtcacaaacagctatcagtggagccaggctggtaacagaatgaaacacgcagacctggtaaagactgtgacaaactggagaagaccacttgctccaactgcgggggcggccactacacagcacactatggaattttcccaagtagaaactagatcccagtattaccggcttccagcattttaagagatgccattagtcttcccagtttttttgaaaactacacagcctgcagacacactgcccacaggctgccatttctctatctccgatacagggccaagtaaagatggaaggcgaggcaaagaagataaacggggatctaaggacagagggtgtggaatagcccctgcgaagagctcagtggctacgacaattcgtcttgtcaaatccctgctaccacatgtccacaccacggatcctggtgcgagtcattctacctcgtctgttttctcatctgtaaaatgtaaatgtcgtcaatctctgcccgtccttgacgactgattatgttgtgacactacactgtaactgaccttgtgtatgttttttttgttttttttttggtgggggggtgatgaaggggaaggacatgaagggatcggtagtggtgagaagaccaacttcccaaatattagtaagtttccatttcttaagcatgtaagtgcccaaactgtgctaacggctttacgtagaattcctccacctaagcctcacgacacccctacaaaattgataaagatatgaatccatttcacaggaagtacgtttagaaactcgcccaaggtcaaacgacctgcaagcaacaaaacccctcagaggtggctggaacagcgggactacagagctcgtgaactcggccgaggaggaaccaggcgaagccggcggacgcgagtccaggccggccaccagaaagacgccccgagcccgggggccaggcccagagttgcggaggccgcccagcccgacctgattcaggctccgctcgcgcgcccgcggccgctccctgctgggggccggaggagcgggcaccgagagacccccagccctgctcgcggccctcgccccggctcaccattgaggcccacggaggcgaccaaaggccggcgcacggcctggccgctcagcgactcccggctgaggaagggccgcttcaggtccaacacaggctgctccggggtggcgggcaccgtggcctgcaccaagggccgcagcgcgcccgccaccccgcgggacgtggccgacaggacgggcgcgaacgggcctgagcgggatgctaccgacaacatggcgacagccgctccaaccgccaagccggtcacagggacgaccttccaaccacggcgcaggcgcgaggaggcgcgggacgcgtgacgacagcgcgccgccggaaaggaaattctgcagtcctgcagggcggggcaaacttggagaggcgctgcgtcgggggacggggctacaagccgtcgctgggggcggggcttgcggcccacctgtaggtcccggtgccacctcgtcagtgtcccgagagatccccagaagaacgagagggctgaacaggggaccccactgacgtccggtgggccgactttacgatcctttagggtaaaaatttcatctaggaagacctagagataacaataaacgattatagtttaacttaggatggtaatatatctcaactacgacgaagtccagcacatagtaatcgctatgtgtttactatgatgatttttattatcttcatctaacaacaacaacaacaaaaaggccagaggcatctgtgcaaagctcgataatgctaatggattatgtttattaagtattcactgtgtatttggttttgcgttttattatacctacgttctttcatttgttatcaaggtctctatgaagtcagagctattactatcagcattttacccatgaagaaaccgaggtttagagagattcttttccaggaactggatagccagcaagatgtgaagcagggtaatctgtctcctgagtctatgctcttcagtgccaccactgtttcccaaagtaggattttagaattttagaggatgcacagagctcgctcattcatgttccatcacatagtgagaaagttttgttttcttttgttttgtttttcaatcctgattgcaccaatgagaaagtctcagtttggtgctaatacatctttaattaaaaaaaaaaaaaagtagagatgaggtctcactatattgcccactccagtctcgaacttctggcctcaaggagtcctgtctccccctcccaaagtactgggattataggcatgagcaaattcacttggcctcagtttgatcctaatatatctttaattcctctctacacttatctcccacttttaacagaaaagatcttgagttagaagctcttagcagagaactgagtctagagtgatttcattatatggttcatagtattgattttctatccatactggttttctattctgtactatactgagataaagtttttcatttaggtcaaaaataatttaaatattaagtaaatgttaatataagcagtgcacagaattggctctgtgctgtgcatgggctctgtgatctgggcaagttccctcacctctctgtgcctcagtttcctcacctgccaaatgggggcagtaatgatgccatgtgtgttgtaaagttactgggaggagtaaatgaactaaaacgtgtaaagcatctacaagcaggcccagcacacaggcagcaccaagtgaggatttgctagtggtgtttttatctgagatgccacctcctctaagaagccttcccttgatccttgctgactcgttgttattcctcatgccaggtccaaagtgtactgacaggtttcccctttgaccttcctatgactccccttagggcctaggctttgaccagccttatagcccaagggactatattgtactctcaagattggaggctgcctcctcaggggccaccctagccaggctcatcacacagctggctcagtgctctcccttggcaacaaccttaggataaaagacatttccagagaagttgtcacacagcatgcatggtttgagtgcttcacaagaaataatatcacaattccctctgagttggtaaggaaatgaaaaatgaatgaatgaatgaatgatccttcacaaaaccttcacaatgtcccagttgggtgaacagaataggaattatctccagacctcctgggttcaattttagtttcaccactcactagctgtgccctagggcaagttatttaatctctgtgtgtgcctccgtctttctcttgtaaaacagagataataacaggatctaccctagagagttattttaaggatgagatggattaatacatgtaaaatgcctagaactgtgcctggcacacagtatgtaaatatctgcaataataataactttctattttctagatgaagaaactaagactcagagaagacaaatgacatgcccaaagacacattgataagaacgcatctggtagtggtgttcgagtccagcgttgcagcagagagatgggtaactgtatggccgaacagctgtcttctcgtggaagaaggaggccaatgtccaggagtggcaggcatactggaacttggacttctgtaggccaacctgggttccacttggtagatgggggtcttgctgtgttgcccaggctggtctcaaactcctggcctgaagcagtcctcctcccttagcctccagagtagctgggactacaggtacacaccactgcaacccctcagtggttgttatttaactgaagggggttttagctttcatgtatcagctcactctggagccagacagcctggccttcatggcagctctgccccttactacctgtgtgacatcgggcaacgttactgagtgtcagatttcttatttgtaaaacagggataaaaatgacattgctgtgcaaattaaaagaaagaatccatgtgagatatttagcacactggcatacaatgagagcttaataaacattgttagttttgtaaactgagggaaaaaaatagccacaggcctgggaacataaatgcttggtaagcttctcagttccctggaagtctgacacgcaatgtgtatgtatgaacaaggcaggaggaagcatgacaccaagccttccttttaacaaacactgtttaaatcagaggtcggaagtcatggactggagattcattctctccccactcatttctgcccagagacacctggtgatctggcatacacagtgctatgaacctcagaattatttgctagcatttacaaattgtgagtactcccacatacaaactgtggtagatggaataatgcctccccacaaaaatgtccacagcctaatccctggaacctgggaatatgttactttacacagcaaaggaatgttgcagctgtgattggagattgagatagggagagtgtattagtctgttgtcatgcggctatgaagaaatacctgagactgggtaatttacaaagaaaagaggtttaattcacttacagctcagcacggctggttgggggggcgccctcaggaaatttacaatcatggtaggaggcacctcttcacagggtggcaggagagaaaataagagcagagcgaagggggaaccccttataaaactgtcagatctcatgagaactcactgtcatgagaacagcatgggggaaaccgcccccatgatccatcacctccacctggtcccccccttgttacaattcaaggggattgtaacaattcaaggtgagatctgggtggggacacagagccaaaccatatcagagagtcttcctgcagtgtccgggtgggtgcggcatgttcatagggtcttagaagagggaagcaagaggtgagaggacagaaatgccacattgctggctttgagggtggggccagaggagggacctgcaggcagagatagagctggaaatggaaaggaaaccttctcccttagagtctccagaagaagtgcagccctacagacctgtgttaggcttcagacctccagaattgtaaaataataaaattgcattattttaagccactcgaggcccatgtcctcaacaaagagaaagacggtggggtgctgtcagccagggtaggtacctgcttggtggtctgggtcctttcccactgtgtccattcagttacattacctgcccatctgctgaggcctcgagtttgggacctcaggtttatataattccttgcacaagcatgatcgattgattccggagagtagcagaacactgatatgcaggggaatctcctagttccaagtgtgagttgtagtctagacacttcctgttccctacagtcttttttttttttttttttttttttgagacaaagttttgctctgttgcccaggctggagtgcagtggtgtgatctcggctcactgcaacctctgcctcctgggttcaagcaattctgcctcagcctcccgaatagctgggatcacaggcacatgccaccatgcccagctaatttttgtatttttagtagagttagggtttcgccatgttggccagggtgatctcaaactcttgacctcacatgatccgcccgccacagcctcccaaagtgctgggattacaggcgcaaaccaccgcccccagccctcttccctactgccttgatgtgttcatctgggcaatgtgtgttgagggggcatagggaggggagctctaaggcaaatgtgctgggattctgcattcgtcatcctcaaaacaaaattggtccctaggtagttctgcctgtgatcctgcataatgtgcaaagccagtaagatgcctttgcctcatccccagggaacatgcctcccagccactttcatctcacctagtgcctacacagaaaggcaaccgcctccctgctgaagggaccccacgcctgtctcctgtttccacacaattaccccgggaaatgcctggcttcccatttccagttgcagccatcttgacagtttcagcctctccccacagcccacgtccctcacttgagcagcgagatgtgaagacagacagccgcttgagaactgcacagactgtccttaatctaagccatttaaaaggcatttgtgttccataaaacccgtttctgtaattctgtgcccctacttctttgaaagatgataaccctagggaggagattagccagggaggagaagttcagatgtgctaatattttaatcgctcattctttcatcacattagtcacattcattaagtatgattaatttcaggctttgttgaaaaccctatcagtttccctatcagccacacatccatctcttgccaagcaggctggtgcagtagcaccaaaagtcccccagtgttttttacacctggattgtattatgtgccccctgaaaatgtgtggaattaattgagctcatttgtttcaaatactttgcaagagcctgggctcttgagtcaggcggcctaagtgtgatcctaagtcctcccattgctggagtcacctgggcaagtgactgacgccctctgagccctggtgtcctcgtctgaggatggagataagaatacctaactcgaaagttggttgtgaagatgaaagaaggctttcaaattgctaagttagttggttatgattgtaattaagggcccttggagatggatcattcatccattcattcatccattcagaagatttgtgtacagtgactactgtatgcaaccctgtgtgtccactgctgatgagagagacagcagcaaacacagcagtcaaatgcgtgtggcccccaggaccttatattttagtggtggaagctagacaaccaccaaacatgtaatataccagatggtggtacgttctatggaggaaagaaaggacgaggggcagggagtcctgggctggtgggacagggtgctatggctcagagggaactcagagatcacctaattcaggccctgacctggagggctcatgctttgcacactgtgctaagaatttggactttctttctccaagaataaggacaatgagagccagcaagcagggaagtggagcaaggatggtgccgtccggctgctcagctgctggctggaactcccggaggactctgtgaggatgcaggtagaaggtgtgtaagcatgtgactgcatggaagccctcggcatgtgatccactccgtgttccaaattgccatcctttctgcgtgctgttagggacttcccccagctctccctgcagagtgaggagtactctgagacagacgggtctaggatgaactgtgttgatggagaaatgaacattttttggagggaaggaagatttcggggtgtggggcataagttgaaggagtatggctctgaaagtccttgggcagtttgtagaggacagagaaggtggtaatgtcagtttctgcccctctcccacctccacctctggccttctcagtggtcctatggctccctaccttcagtcatcttgttctcaagcctgaagtgctggatccactcagctgcaacccagctcaacacctctgtggaagctttgcccatcaatcaggagaagctgagatccagagactgatgcccacgttctgtctttgcagagggaagcccaccagagccctcttctctctggggaggagctggctccctgaatctccaagacaaacccagacagccctggggaccttgaatgtgagcaaggggagcagaaaggaggctccagcccacccagggcccctgcagggtctgcacacacaattacaggtcctcatttccctctcctaatgatgccccaaaacattaagggaagttaaatcaaaccaccaggtgtccagcatgaacagctgaaataataaattcacgaggtaagtaagacattttatttgtactatttcaaaattggtagatgcaggaaagcaaattgtgatgtgcttgggatttaatttgtatttcaaggtactaatgaaggtagcacccattttcccaaaggccttttcatccctgaatcttgagagcacttttctaagcatattgggaataaattaagttgcaaaacctccatgaaaaagattacggttaaaacataattttgaggaaccacttgagtttatccatttacctgcttttaagtacacacacctattttttttgcaattatttttcacaaaagaaggaactttgtgtgacgtatacaagcaggtaatggcaaacctccagcatctttaaaataaaactcaaattgggctgggcaggatattacatgcctgtaatcccagaactttgggaggccaaggctggtggatcacctgagggagctcgagactagcctgagcaacatggtgaaaccttgtctctactaaaaacaaaaaaaattagccagacatggtggcgggtgcctgtaatcccagctacttgggaggctgaggcaggagaatcacttgaacccaggaggtggaggtaacagtgagccaagatcatgccattgcacttcagcctgggcaacaagagccaaactctgtctcaaaaaaataaaataaaataaaaataaaactcaggctgaactaaaccagccttctgagtcaatgtgcagatattccataatgaagtatgctgattaataaattatttgattaccaggtaagtatacctgcaatcaatataactgccgaaaagctctgaattagaaatggtgcaataaaatttaactgaaaggtattaggaattggtagttttaattacagggaatgattaattgatcatttagacagtattgatctacaacttatttaattctttgcaatttaatttgtcagatttgaatccaaataactgatgatttgttccatgaatgccagagctggaagggatggggttggcagaagagacaagactggaccatggacctggtggttctgtgcagaggccaaagctactctccttcccacctggccctgtgctgggcctaacctggagccccctctatcctctgcctcattcttctccgggtcaaggtccagcatgaactccatgtcctccaggaagccctggtggacttgggcagacctggggacacgtccagcctcctggcaagatgggggtaacaggagtgtgtataaaggggaaggcaagaatgtgcccttggtggagcagtgaaaagaagccctcatgtgacaagtgttttgctcctaacccacctcctctggtgacatcttctgggttaactgctcttgctgatctctgcacataaaccaagctaactgtgagaggcctttcatttctagtttaaagcaaggagaccacagttccttctgaacactcacccccaaggagataaggagggcgtcccatgagcaacactgtgtgttaaagatgtacacgagcactgggacctgaccaaggacaaacacgtctccagccccctcagacccttgctgctgctcagatgtccgctgtcatcggtcacatcctaacctcaaccccctctctcctcccacataaaaggaggctgaaattcatagtaacttcagatggttctttaggacactggcccaccaccttctcggttgctggctctccaaaacaaagccccctcccttgacccaattccttgtttcttgacgtactggctgttgtgcagtgcatggtaccggcttgaactcggttatgttggcatggcctctggcggtgctcagtttgtgtggatgagtattttacagctactgtcctatttccagtccccttcctctggacggctatgggatgtgctgtggatgccctctcttaggctggaataaaccaccctaccttctcctctgccttgtctccaccaaataaactccttaaggcagggatagagtcttgcactccacgaagaagtattgctgcatcctcagctgtgtaagagtgaccgggcttcttctattccacctgtaatggaactttaggcacgcagagagagatggcaaatttgtgctggctgaaggggtcagcaaatgcatataaggcttcttgtgctccagagagagaatggagtgcagtcagtgagaccctgaggggagaaggaaccaaaagcctgggcagaagggatcgtggaggtgcccagggtcaggagggatgggaagggtgaggaacacaagagatcacctggaggcattagaggagaaggcaggcactggggatggtgccgctgatccaggtggagcaacatcctaggacccgagtgctgggcaggtgcatccgtggagggaagcttctctcctctctcggctcctgctgagagaggcaatcattcccctggcttgccctgcaagagacaggagctctaggtagatctctgctatctagggaatagaatgtgaatatttgaaagttctagaggtcaagtcttaggttccctctcagctcagatcccaaatggtacactctaccctaacccccttttcttgtagctttgctacatggagaggaaaataccttgccagacaccaacagtcccttctcagcacttttgtgtgaagacaactcagaccctaagagaatggggtctaatttgcaggtgccactggaaggcagaggtcacgggagccctggacttcagacaaggtagagggatcctggagacagcacatctggccctggagccctgcccacccggggagtgagggcagctctcctgctctcctaggaggcctgcccgaggacccccatgtcctctatgtgtgggattctgcagtttgcactcacaacccagagccttttacccaactaccctgtttgtaggaatgtgtccaaaataagcatcagacaagtacatgaagatgaatgtgcaaagacgttcataacaggattgtttataatcatgaaaaatgatctgcagatttcctgtctgctgtgcaggatgagttagacggggatgcatccataaaatcactttgccctcatttaaaattatatcatagatctatgtttaatgacatagtaaacggtactcaatgcattaagtgaaaaaagcatatacatatcaggatgtatatgatcaagtttttgttaaatggatgcatgtatgcatgtcagtaactgtctgtgtttgcaaacaaaacgtctagcaagacgtgcatcaaatattaacaatcattatctttggattctggatttattgacttctatttttgactttgccctttgtttttctatgttatctgacacttttacactgagtttatattatttttacaattaaaatatcaatccatcaatctacctccatttgggaagtagtaaaaagtacactgagtttatattattatttttacaattaaaatatcaatccatcaatctacctccatttgggaggtccatttcaactacacaaggaagacaggatagggaggaatagcactaagtatgagtgcctgtgattcagagagggaagcgacttggaattctagcccagctcctccacctgccccctctctaactcttccactctcccatacttgctcccggtgccccagcactcctgggtgcctcctgtcttcccagcacgcacaacccagctgagctttctattagtacccactttacccctgatcttcccgccctccacacctcttgtcactcccagtcactccactgatttttatttttttatttattgatgtcatcaccatctgaatcaacgatgtctgtttctttgcctgctcacttacagttggccttgtttactactgtgggaagctaatggtgtctactgtagccaaatcagcacatttatttatttatttatttatttatttatttatttatttggagaccaagtctcactctgtcgcccaggctggactgcagtgccgtgatcttggctctctgcaacctccgcctcccaggttcaagtgattctcatgcctcagactcctggtgggactgcaggtgtgagccaccacacccggctaatttttgtatttttagtaatgacgggctttcaccatgttggccaggctggtctcgaactcctgatctcaggtgatccacctgcctcggcctcccaaagtgttgggattacagacgtgagccactgagcccagcctatttattatttattttattttattttatttttttgagacggggtcttgctctgtctcccaggccagagtgcagtggtgcaatcatagctcactgcagccttgaactcctgggctcaagcactcctcctgtctctgcctcccaaatagctgggactacagatgtgtaccaccacacctggctgtaatcagcacctttaaagaacctaaagatggactcctgcccatcccaccccatgaaatctacatctgaatattagagaaactccaagggagttctcagttttcccatatcttctctgctcacacctgtgtccccacaacagcatacatcttgtccactgtatgtactcggtgaataagtaacaatcgaattgatagataagtggatgcatgtctcctgagccttggggaagaaaagagaagacagaagagggctacattagagaggaaagtttttaggccactgggcaggtacaaacaaggccaggcacggtggctcacacctgtaatcccagtactttggtaggctgaggtggacagatcacctgaggtcaggagtttaagaccagcctggccaacatggtgaaaccccatctctaccaaaaatacaaaaattagtcgggggtggtggcacgtgcctgtagtcccagctactcgggaggctgaggcaggagaatcacttgaacctgggaggcagaggttgcagagagcgaagatcgcaccactgaactccagcctgggcaacagagtgagactctgtttcaaaagaaagcaacaacaacaaaaaacaagagcaggtgagtatcaatgagaagaaacccctatccccagcagttggtgagttgagaatcatgccaaggaggacactcggaacagccaggtcagaaagcagcagcccctggtgatggcctggcccgcccagacagtgaatgccgttttctaaacctggtgagatgataaaattttaacctgctatgtaaagctatttttaaacatggaggggaaaaaaataacctttccctgggtaaaaccgtaacagtcacttagagcacaatggatctttattttttatgaccaagttataaattgttgaaaataagagtttcaaatggaaatgttgacataataatcttatctatagcagcatgaataaccaactataaccgttattattctgtgttctatgaacgttggcttttttgaaagttcaacttgctcaatatgtttgccttttaacatgagttaagaggtaatttgcatgaacacaaataaagaagtatcaattcagtggcattatgaattaattagctgcagcccaccatcatgaattgggaaatgcaaccgcactttccatctcttttatttatagcccactcttgctacgttacaccttttcagatattaagtactgaacatggttgcttcttaaaaaggttaattatccaagacaggtttatggtaccttatctaaaggccaatattctacttctttgggatcttggatttacataattacaatcagtggaaagtttatcagtcagatttcctttcccaccactcctcagcaggcacctttgtcctcttgagatctaccagtactgggggtctccaccagctggtctttgtttcttactccggcaaagcaacattgacagcttgcaacagccaactttccttgccttaaatgtgaggcacatggaatgaccacatgagcaaggcaggctgaatccagcccaaagcctgcagcacctggagcagagctcaccagtggaggctgtgcgcaaaatcaggcccagagccatggtttctttggcctgtaaagtgttaaaaaatgagattggtgggggaggagccaagatggacgaataggaacagctccggtctacagctcccagcgtgagcgacgcagaagacgggtgatttctgcatttccatctgaggtaccaggttcatctcactagggagtgccagacagtgggtgcaggttggtgggtgcacgcaccgtgcgcgagccgaagcagggcaaggcattgcctcactcgggaagcgcagggggtcagggagttccctttcctagtcaaagaaaggagtgacagacggcacctggaagatcgggtcactcccacccgaatactgcacttttccaacgggcttaaaaaacggcgcatcaggagattatatcccgcacctggctcagagggttctacacccacggagtctcgctgattgctagcacagcagtctgagatcaaactgcaaggtggcagcgaggctgggggaggggtgcccaccattgcccaggcttgcttaggtaaacaaagcagccaggaagctccaactgggtggagcccaccacagctcaaggaggcctgcctgcctctgtaggctccacctctgggggcagggcacagacaaaaagacagcagtaacttctgcagatttaactgtccctgtatgacagctttgaagagagcagtggttctcccagcatgcagctggagatctgagaacgggcagactgcctcctcaagtgggtccctgacccctgacccccgagcagcctaactgggaggcaccccctagcaggggcagactgacacctcacacggccaggtaccccaacagacctgcagctgagggtcctgtctgttagaaggaaaactaacaaacagaaaggacatccacaccaaatacccatctgtacatcaccatcatcaaagaccaaaagtagataaaaccacaaaatggggaaaaaacagagcagaaaaactggaaactctaaaaagcagagcacctctcctcctccaaaggaacacagttcctcaccagaaacggaacaaagctgaacagagaatgactttgacgagctgagagaagaaggcttcagacgatcaaattactccgagctacaggaggacattcaaaccaaaggcaaagaagttgaaaactttgaaaaaaatttagaagaatgtacaactagaataaccaatacagagaagtgcttaaaggagctaatggagctgaaaaccaaggctcgagaactacgtgaagaatgaagaagcctcaggagccgatgcgatcaactggaagaaagggtatcagcgatggaagatgaaatgaatgaaatgaagcgagaagggaagttcagagaaaaaagaataaaaagaaacgagcaaagcctccaagaaatatgggactatgtgtaaagaccaaatctacgtctgattggtgtacctgaaagtgatggggagaatggaaccaagttggaaaacactctgcaggatattatccaggagaacttccccaatctagcaaggcaggccaacattcagattcaggaaatacagagaacgccacaaagatactcctagagaagagcaactccaagacacataattgtcagattcaccaagttgaaatgaaggaaaaaatgttaagggcagccagagagaaaggtcgggttaccctcaaagggaagcccatcagactaacagcagctctctcggcagaaactctacaagccagaagagagtgggggccaatattcaacattcttgaagaaaagaattttcaacccagaatttcatatccagccaaactaagcttcataagtgaaggagaaataaaatactttacagacaagcaaatgcggagagattttgtcaccaccaggcctgccctaaaagagctcctgaaggaagcgctaaacatggaaaggaacaaccggtaccagccactgcaaaatcatgccaaaatgtaaagaccatcgagactaggaagaaactgtatcaactaacgagcaaaataaccagctaacatcataatgacaggatcaaattcacacataaccatattaactttaaatgtaaatggactaaatgctccaattaaaagacaccaactggcaaattggataaagagtcaagacccatcagtgtgctgtattcaggaaacccatctcacgtgcagagacacacataggctcaaaataaagggatggaggaagatctaccaagcaaatggaaaacaaaaaaaggcaggggttgcaatcctagtctctgataaaatagactttaaaccaacaaagatcaaaagagacaaagaaggccattacataatggtaaagggatcaattcaacaagaagaactaactatcctaaatatatatgcacccaatacaggagcactgagattcataaaacaagtcctgagtgacctacaaagagactcagactcctacacaataataatgggagactttaacaccccactgtcaacattagacagatcaacgagacagaaagtcaacaaggatacccaggaattgaactcagctctgcaccaagcagacctaatagacatctacagaactctccaccccaaatcaacagaatatacatttttttcagcaccacaacacacctattccaaaattgaccacatacttggaagtaaagctctcctcagcaaatgtaaaagaacagaaattataacaaactatctctcagaccacagtgcaataaaattagaactcaggattaagaatctcactcaaaaccgctcaactacatggaaactgaacaacttgctcctgaatgactactgggtacataacgaaatgaaggcagaaataaagatgttctttgaaaccaatgagaacaaagacacaacataccagaatctctgggacacattcaaagcagtgtgcagagggaaatttatagcactaaatgcccacaagagaaagcaggaaagatctaaaattgacaccctaacatcacaattaaaagaactagaaaagcaagagcaaacacattcaaaagctagcagaaggcaagaaataactaaaatcagagcagaactgaaggaaatagagacacaaaaaacccttcaaaaaattaatgaatccaggagctggttctttgaaaggatcaacaaaattgatagaccactagcaagactaatgaagaaaaaaagagagaagaatcaaatagatgcaataaaaaatgataaaggggatatcaccaccaatcccacagaaatacaaactaccatcagagaatactataaacacctctacgcaaataaactagaacatctagaagaaatggataaattcctcaacacatacactctcccaagacaaaaccaggaagaagttgaatctctgaatagaccaataacaggatctgaaattgtggcaataatcaatagcttactgaccaaaaagagtccaggaccagatggattcacagccgaattctaccagaggtacaaggaggaactggtaccattccttctgaaactattccaatcaatagaaaaagagggaatcctccctaactcattttatgaggccagcatcatcctgataccaaagccaggcacagacacaaccaaaaaagagaattttagacaaatatccttgatgaacattgatgtaaaaatcctcaataaaatactggcaaacagaatccagcagcacatcaaaaagcttatccaccatgatcaagtgggcttcatccctgggatgcaaggctggttcaatatacgcaaatcaataaatgtaatccagcatataaacagagccaaagacaaaaaccacatgattatctcaatagatgcagaaaaagcctttgacaaaattcaacaacccttcatgctaaaaactctcaataaattaggtattgatggtacgtatttcaaaataataagagctatctatgacaaacccacagccaatatcatactgaatgggcaaaaactggaagcattccctttgaaaactggcacaagacagggatgccctctctcaccgctcctattcaacatagtgttggaagttctggccagggcaatcaggcaggagaaggaaataaagggtattcaattaggaaaagaggaagtcaaattgtccctgtttgcagacgacatgattgtttatctagaaaaccccattgtctcagcccaaaatctccttaagctgataagcaacttcagcaaagtctcaggatacaaaatcaatgtacaaaaatcacaagcattcttatacaccaacaacagacaaacagagagccaaatcatgggtgaactcccattcacaattgcttcaaagagaataaaatacctaggaatccaacttacaagggatgtgaaggacctcttcaaggagaactacaaaccactgctcaaggaaataaaagaggacacaaacaaatggaagaacattccatgctcatgggtaggaagaatcaatatcgtgaaaatggccatactgcccaaggtaatttacagattcaatgccatccccatcaagctaccaatgactttcttcacagaattggaaaaaactactttaaagttcatatggaaccaaaaaagagcccgcatcaccaagtcaatcctaagccaaaagaacaaagctggaggcatcacactacctgacttcaaactatactacaaggctacagtaaccaaaacagcatggtactggtaccaaaacagagatatagatcaatggaacagaacagagccctcagaaataatgccgcatatctacaactatctgatctttgacaaacctgagaaaaacaagcaatggggaaaggattccctatttaataaatggtgctgggaaaactggctagccatatgtagaaagctgaaactggatcccttccttacaccttatacaaaaatcaattcaagatggattaaagatttaaacgttagacctaaaaccataaaaaccctagaagaaaacctaggcattaccattcaggacataggcgtgggcaaggacttcatgtccaaaacaccaaaagcaatggcaacaaaagacaaaattgacaaatgggatctaattaagctaaagagcttctgcacagcaaaagaaactaccatcagagtgaacaggcaacctacaacatgggagaaaattttcgcaacctactcatctgacaaagggctaatatccagaatctacaatgaactcaaacaaatttacaagaaaaaaacaaacaaccccatcagaaagtgggcgaaggacatgaacagacacttctcaaaagaagacatttatgcagccaaaaaacacatgaagaaatgctcatcatcactggccatcagagaaatgcaaatcaaaaccactatgagatatcatctcacaccagttagaatggcaatcattaaaaagtcaggaaacaacaggtgctggagaggatgcggagaaataggaacacttttacactgttggtgggactgtaaactggttcatccattgtggaagtcagtgtggcgattcctcagggatctagaactagaaataccatttgatccagccatcccattactgggtatatacccaaatgagtataaatcatgctgctataaagacacatgcacacgtatgtttattgcggcactattcacaatagcaaagacttggaaccaacccaaatgtccaacaatgatagactggattaagaaaatgtggcacatatacaccatggaatactatgcagccataaaaaatgatgagttcatgtcctttgtagggacatggatgaaattggaaatcatcattctcagtaaactatcgcaaagacaagaaaccaaacaccgcatattctcactcataggtgggaattgaacaatgagaacacatggacacaggaaggggaacatcacactctggggactgctgtcgcttgaggggatgggggagggatagcattgggagttatacctaatgctagatgacgagttagtgggtgcagcacaccagtatggcacatgtatacatatgtaactaacctgcacattgtgcacatgtaccctaaaacttaaagtataaaaataaataaataaataaataaaatgggattgtatgcctataatcctagctattcaggatgttgaggcaggaggatctcttgaggtcaggagtctggctatgttgcccaggctggtctacatagccagactccatctctacaaaaaaatttttttaaaaaattagctgggtgtggtggcatggatctgtaatcccagctacttgggaggctgaggcaggggaatcgattgagcctgggagatcaaggctgcagtgagctataattgcaccactgcactccagcctgggtgacagagcaagactctgtctcaaaaaaaaaaaaaaacacaaacaaaaacggaattgtcaaccagtatttgaaaatttggaggttacacacacacacatgcacacaccacacagacaatcagattgtcagaccataacagctgcactcctaggcagcaaccatgaggagtgatgtggagaccccggtttagacagggcctgagttctgcagcttctccgtggttgctcccagctcccattgtcttctagaacacgaagctgaggactggttgtgatttatccctcaatattgggtgcattgaaaactgtatggtacctgcctggcccttgtaactggaggagacatttacacaagggcagggctgcacctggggtagggagggacagggagggagaggagtacaagacaccacatgggggcatggaagaaggcaggctccggggttggtgcccccaatccaggtagagtgagtacgcctggcacctaagtgctaggcagatgcatctgtggagggagactttgctcccctcttggctactgcagggagagaggtaggaggagacctccctggaaggtgctccaggggaccagtttgcaaatccaagccctgcaaagccaagaaggcaggcctccagcactctattcaaccacctgcagacagtgtgcaaggtgagcaagacagaaggcaggactgcaggaagtaagcaaggaggtgacacagacagtgcctggagctgagagtgagagctgctcatgtgcatgatcagtgagggcctctctgtgatgacagcaggggagcagagaccagaacaagatggcccaggaagagctggggtagatgttcaaaggccctcatatgggcttaaaggcggtaccacctaggctctgcggagacgctggggtgatgggtatgagtgagctagcctaaggtgagaggggaaagcctgcaagagcttgatcagctagtgtttttctctttctctttttcttttcttttcttttttttttagagacaggttctcgctgtattgtccaggctggagtgcagtggctgttcccaggaaccatcccactgctgatcagcatgggaattttgaacttctctgtttccaacctgggcagtttcatccctccttaggcaacctgagggttctgcactcctgagaggtcattatttgggggctaaacttagtgcagacacccgactggcacagcgcattatagccccaaacttctgggctcaagccatcctcccaccttgcctcccgagtagctggactacagtgtgcaccactgcacccagcaagggcaatgttttttgcactgtgaagacccattattagatcgtaagatccattcattggatcttaaccagtatttaaaaaataaaaataaaaataatacatcataaaacagcatagaatagtggagaaaatacaaatgcattgcccgtaggaagggtgagcttgctttgtgagcctttatttcagttttacgtatgcacatgcacacacactgggtctggacttcgagtgccaggctgcagatgcctttaccttgctgaggccccccagctgcccacctgaaggaaatcagataagtgaagctgatgcgatgtgatcccttaaaagtcaggtggaacattcaggaggccctgagctaaacattgccagcagcaaggtcacaactgccagaacagccaaggccactcctgctcagcacagagaaggcagccaagcagatttcttggagcagctgccaagagagtctgcccagtgtgatggagaaagagccccacgtgtggagcacctgccaggtgccaggcactgcgcatcccgatctctgggtgagctgtgctccaagggccaagtccatgtcagtgttgccataagagatgccccaggcccagcaggcagtgcatgctccccacccccaccatgagctgagtgtttctggtcctcacatcagccctgcaaggtagatcttatgatctttgtgtcaggggtgaaaaactcaggcacagtgttcagtgactagctgaaggggcagagccagaattcgaacccaagtgagcctgacaccagggcctaggttttctcttccatgacacagttctcaccacactgagagtcagaggaggcacaggtcctctcctggggcttccagaagaatactgcttacaagaaaaaacaattataggaaaaataaggtgtgagggatactacggacacagctctgcattggctgggagagggacagatcaaaagccttctagcaaatatcaactccatgaggacaggcactgtgtctgccctgccttccaccaatccccagctttcaatacagcacctagaacatggtagctcagtaagtatctggtggatgggtagatggatagatggatggataaatggatagatgaatggatggatgaatgaatagatggataggtgagtggatacatggacggatggatgaatgatcactgtatggataggtgaatggatacatggatggatgaattgatggatgcatgggtgtatggtggacggatggataacagcggactggatagatggatgaattgatgaatacatacatggatggatggatggatgcatggaaagagatctgtgttgttggtctataccttccaatggctcatttgttagcaggccacattctctttattggcctcaattctgcacctgtagcctgagggcctgagttcagactgtattcagggagctttcatgggtgccatcagaggtctcccggacaatcctgctagactggctcctccctccattcccacccctatccctagaaaagcacagaatgccaaggctgcccagttgtgcacctgaggcagcccagttgggcatctctaagaatgtatgtagattatgaatgtgactgaccccatcctgggtgctgcagctttgaactaacacttaaaaaacaaaaaaaagaacacacacacacaaacacacaaacacacacattctggagtgagcttggcaaactgcttctgagcccttcctgtgtgggtagagagcacagtaattaaatggactggttctggagccagacttcctgggctcatctccttcgtggcagtgagaccaggcactggattctctgaggtttcacttatcctctgttaaatgggatagcacctgcctctccaggtcactgtgagggtcagacgctccccttagcggggactttccatatcactggggtttaccaacaggtcggtaaactctgtcacagtggcagggcttctcaagtccaagttcagcactaccccccagaaacaggtgagatatccttttcctgggtttacagtgtcctggagctttgtgaaggggctggtgtatcacatgaggtaatgatctgggactggatggactcccaggacaggtgtgagtgtcacctctgctgggtggccaaggggcacagtgctggacactgacaacatgaagtactcacctctatgcaatgctgactctcaaacccaagcaaatagagtctgcaggtgtgagtggggcatagagctgggtggcctgctgaagaattcactgccttgccatccctgaacacacacacatgtggtttctcccagaccttcgacaggctatagcccctggctttccccagtacgtttcctccttacatagttttcccaggagcctgacacctcactcccacctaactcttcttcctccctgctttcctgagagatattttagccatttctactaccaccattgcctcaaaccctgttctcttcctttcacagggaaccttgccttcttatcctaggagcctaaattattatcaatggaaaaaaatgcttgctagaaggcaaggctggcttacttattacactctactgaaaaatgggagaacaatcacccagtccgacaaaggaagggggacaatgacacttgtatggcactcactagataggctccatagcatattttctttttacttttttgagacaaggtctcactctgttgcccaggctggagtgcagtggtgcaacctgggctcactgcaacctccatctcaagactcaagtgatcctcccatctcagcctcctgagaagctgggaccacaggcatgtgccaccatgcctggctaatttcttgcattttttgtagagatggggtgttgccatttttcccaagctggccttgaactccttggctcaagcaatccatcctctttggcctcctaaagtgctgagattacaggcatgagccactgtgctcagcctagcatattttaagtgaaagaaaatagtagtaaacttgaagacagatcaatagaaattaattcagtcttaggtacatacacaaaaaaggttttaaaaataaaaatactttcagagatgtgtgagactatagtgtgtggtctgaaatgcaggtcattagaatcccagaatgagaggagcaacagaaaaggaaagaaaaaaatatttagagaaagaatagcctcaaaagctccaatttctgttgaaaaaattaacttacagatgcaagaactcgataaaccccaagtataataaaactaaagaaaattctactggatatataatactcaacattcagaaagccaaagaaagataaaattttgaaaacattcagccaaagtgactccagaagaaaaccagtaagaataatcactgatttcttatcatgagctatggatgccaaaagaaatagaaacaatataattcaagtactgtagggtggaaaagaacagtcaaccaagaatactatattcagataaaatatgcctcaaaaatgaaggttaaatagagacacttttagaaaacaaatactgtgataatttgttaccaccaacagacctgcactacaaaaaaagtaaaggaggtcctttaagctgaagaaataaagagctctgaaaatagtggatatgttcataaatacaaaggaccatttgtttaattttcttcttttaaaaatatgattgtttaaagcaaaaattgtaatactgcacaaatgggtttataatgtgtgtgtgtgtatatatatatataaaaataacactaaaaatagggtggcaaatggaaacatactatttcaagtttcctatattttgtgtaaagtaagttgatattaaccataagtagaatgggttaagttaaaggtagctatagtaatcctattaggaaccactaaaaacataaggcaaatatgtatattttggagacagggtctcactctgttgcccaggctacagatgtgtgccaccatgcctggaggttttttttttttttttttgtagagatgaggccttgctgtgttgctaggctggtctaaagcagtccttctgcttccacctcccaaaatactgggcttacaggtatgaatgcctctcctgcaaaatatatagatagaaagccaataaggaatttagatgaaatactaaaatattttaacaaaaaagaagaccagaaagtaagaacaaggggagaacaacaccaaatagattaggcaaatagaaaataaatagaaaaatggcaaactttgatacaccatgtcaataattacattaaatgtataaagaatattcacttcaatcaaaaggcagagatttttaagggttggataaaaagcaagaattggccagacacagtggcttatgtctgtaattccagcattttggaggttgaggcaggaggactgcttaagccccaaaatgtcagaccagcctggggaacatggtgataccgcaactataccaaaaaaaaaaaaaaaaaaaaaaaaggtggaggtatcgcttgagcctggaagtttgaggctacagtgagccatgttcacgtcattgcactccagactgggtgacagagaaagaatcctgtctcaaaaagaaaaaaaagaaaaagaaaaagcaagaatcaagtatatgctctttacaatagacacaatttaaattcaaatacaagaaaaatatattgaaagaaaaatatgcaaaaaaaatgcaaaatgtaaacatacaaaagctgaagtggtcataataatattagtcaaaatagatttcaaaacaagtgctattattactagaggggaagaagaactttgcattactacaaaagagtcaggccaggcgtggtgactcttgcctgcaatcccagcactttgggaggctgaggtgggcagatcaccaggtcaggagatcgagaccatcctggctaacatggtgaaaccgcgtctctactaaaaatacaaaaaattagccgggcgtggtggcgggcgcctgtggtcccagctactcgggaggctgagacaggagaatggtgtgaacccaggggcagagctggccgtgagctgatgtcgtgccactgcactccagcctgggcgacagagtgagactctatctcaaaaataaaaataaattaaaaaatttaaaaaagagtcaatacaatcaggaagatatggcatttataaaggtgtaggtgcctaataacagatcttccaaatacatgcataaaaattgacaaaattaaaaagcaaaatagacaaagccacagtcatagtaagagacgttagtgcacctctctcagggggcaaagagaactactagacaagaaaccagtaaaagtatggaatgtctgaagaacattatcaaccaccttcacctacttgacattgatagaaccctacaccaaacaactgcagaacacattcatttcaagtgcaaatggatgtgcatctagtagatcatacactatgtcatcaaacaaattcaatagatttctaaagaatgaaatcttacaaagtatgtcctctgaccacaaagaaagtaaattataaatcctagcagaattcagtcagtagcagaaatctcaccccgtctagtatcctgagaaacttttgaggaaaatctcctctctgcagcttttcagtaagcactgaactggggaagttcaaaaataaatttttcttttaaaaataactatcctgtttccactctgataagcacatgagcaaccattcctcactttgagctgatggcagaaaatgcaactccagctggagttagcaaaaaataaatgcattagctcatgtgaacagaaaaccccagcatgaggatatggtctcaccctcagcctcccctcagcctcccagctctactttattctgtgtggactccctcttgagcaatgtcttctatggcaggatggccacgttcatcttcatgtctggcagaaacagagctagtgttttccaagaggcacagcttttcgttatcactgtttctgattggctaagtctagatcacatgaccactcttgactctgaggttggcatcaatcattccactcactgcaagggttgatagtgagttggtggtttcccagagggacactgaggttgagaagagagaatgaactgagcaggcaatgacagcagatgtgcactccctgcacccactgggtttaaagatggtggagcaggaggtagggagaaatgtggagggatctgatgggcagatgaaatcccagcaggtcagaacttaccccagaacctagcttaacccccctgtctttccagacaatggtcacttccaggtggggggctgattagtgcatgtgtacacacacacacacacacacacacacaacacaaacactcattgttttcattttctttccattttttcacaatgaatacaacttatattatttctgtattgtgttttgaaaacacaaatatttaaggcaaaaacatcctttgggggttggaatcttttttctttttgaggggacatagagtagaattatgaaaagatgcttatcttcaaggtcaaaactgtacactccacaggtgctattacaaacatttagcgagtttctacttttaccctcaaaataggaataacctctcatttaattacctcataagttgtggggaaagccctcaccaaaacgtggagcatttgagatagtgcatgtaaaccagctttctataccgaaggtgttttacagaggagagaaaaggttatctgtatttcaattctggaagccacaggaaagtaacttgtgttactttcagaaacacaagtttctgaagctcctattcagaaaggatctttttccacccttcagagtcacagccttctttcccccaaagggagaagcctttacctgttgtatctctaggctttaaccaccacacaaatagaaataacaattgtagcgtggaacaaacccaagggacagaggcaattaaaaataaatcagacatcttggaaaaagtcatttgcagaaacagttgtgtccacagcatgaaatatggaggaaatacattaaagcaaaaattaatttaataaacactcaccctcattctttttaaaggatcgaatagtataaaatacttcattaggcaaagtctcagcaggggaacatggacttttttaaaaaatgactttgtaagttagagatggaagataaaaaagaagagagagatggggagaacatggcttttgtctgagtgtgcaactttagaatagggcagggaagttcaactatggggagaagatggtcagggtgcttaggaccccctcatatcccaggggtcccatcatgctagaaacacacaaagccagtgagacaatggcagcctccacccagataatccacacacacagaaacacatctgatttaagacccagaaatggcttcaacagtgccatctcctgccctaagctgctctgcacttgctctgggaggtgagtagaaatgctactgaggaaggtaaatcatctgatctcccccaagttgatcccaaggccttgcgcggtgctgggggatcagctgatgcccccaaatgcgtgccgattgatgtaatgagcatttgggggtgccaacccagggtcctttttctgttcacttcctactgatacccagctttttcttcaggaatccacctcagctcatggcccgacccagaattccagattggggcttttagtggctgaaataaattcaggtattccatttcccagacctggtcattagtttagaggtgacccttctgcaatgttgagacaggaacactcaccaactggattctgtgatgtgcaggcaggaaacctaaaattgtgggaacaactatggctgcaaaaagggaagtcagcccagggccaaagccagcacacacagaaggacccagagggagatcaagcaaaatagggcaccctgatcatgccattcctgaagctgtgctttccttgatttccaacagtttattccagtaggaataaatcttgcttgttttataggctggttggaatttggcagcagtttgatgtttgcatgttaagagttctgacactgagcaggttggagaatgagaaagagcaagacaagagaaaggaagggagagggaaattaagaaagggaagcaaggagaaaagagagggaagaaaggaggaaagaaaggaaaagaaaggagaaaaggagagggaaattaagaaagagaataaatgagaagaggcaaatcataataataataatccagaagaataaaagatttttagggcagtatggggttgtgtagactgatatgtccagctctcatattatggatgagaaaatagaggtcccaagaagcaacgtgactctgccagggccacaccatcagtgtgacccagcatgaggacccaagcgtcccggcacccagcctccttctttcttcccccaagtcacaaatatagagaagcagtttttatagctaaagtagttcttgcttattacagagaatttgagatgtgcacagaagtagaaaaaagaaaaaagccataatgttaccatgcagatataaccattattaacatttaaccaattttcctgtcagtattcttctgtatttaaggatcatttttacagagttttaaaccctcagtttacataattgtattccctgcttttttctcttatgtcgtaagcattccccatgttactgcatattcttcaggaacaaaaatgtttgactctataatattcaatcaggcagatagaccctcatttatttaaccgttttcctaccagttttcctaccagtggatatatttttcaaattttcaacacttactttcaaaacgcttgaagatcctcacataaaacttttttgtatgtaagattatttacttataattgattcacagaagtgaaatcttagggttgaagggcaggaattagggttgccacatttagcagctaaaaatgtaggatttaaatttttcatttcaaattatttatctgcaattgaaatttaactgggagttctgtattttatctggcaaccttagcaggaatatttttaaaggtttccatacatatttccaatgccctcagattagaaaagagagagaatgagggaataacatctaacattctattttgtgccatgcactcatttaaatattttatggccatttaagtgcatttaagctttgtgttgacctctaagttaaggaattattgtgagccctactttgcagatgaaaaagcagaggtcgacgaggttaagtaaaatgttcaagactacacaactaggactccgggggaactagaattgaacccgggcagcctgactgctacagtgtccccagaaagccaaggaaagagtgaaacaggccgagagaggagattcaggctgtgactcttgagagaagcagacatccacggtccgtcttgcccgggtccccctcgaagtcaaaatcagccatgtgagcagtctttcccgactcagagaccccaaatcctcaccacacattagcaggatattgatcattcactgaacacattggggcaagacagggatccacgcataatggaaataatttcataaaatccattttaaaactggtcaatcccgtctcgagttcctctccagctgccaggctggtccttcccatctttcagcctccacacccatcactccactcagctaaaacaccccctctaccacctagacctgccctccctggaaaggagaggttatacttaatgaatctccctgtttttcaaaatatcagacagtaagggactttattccttccttcttccctgtctcccatacatttccttcctttcacttcctcccttccccatgtgacactcaccaagcaccaagaagatcttcctccacccagaggcaatgaagacatcccaggcaacagccctaggcagaccacagagggtagccaggctcgaaggcttcagacaaagagccgggagggcccagaggggacacagcgctcccacctgggtagcgtgtaagacttcatggcacaggtgccgctgagctgcgcactgaagggctgatagattttgtacaggtagagatggattggaattaggccaggggtgaaagggaagcagggggctgccccttcccagtgagaacattttgaggacgcagtctagggaaagagagagcagggcttgagcctgaagcagactgagttctccagaatccccacgcatacttatcagcaactcctcgtggctgatgccgaaagagtcctgggtgacgccagagctggcttctgggatcttgttgtggggagcatccccacgtggccaggacccccacccattgctgggacaatatacagttgatatgcatggcttcacccaggccatcttttaaatgactcacaaaatgcatctaggattttaaaactgctcataaaaatggatcaatcagcacaaggctgaaataactagttccttttgctaggaaaaagaaaatgtgcttcttaattattgtactgattgcgtgaaagtttttttttaaatgcaacaaagaggcctctgaaggccctgtccttctacctgcctatagggtaaagaatctaattaaaacaaagaaaatagatgaatatttaatgatatgattttcccccactactttttacttctcaacttaacccagtgacagctccaaaaattcctccaacaaagaacacgcaaaatcccacgagcgtgatctatcagagcagagtttgcataaacagctctgtgcttcagagctgacgccacaactcctccctcaagccagccatggctgctgcttccacagccctctgagggtgccctggcctcctgtcctaaacatcccgggccttcagagctgcctgcccctgaggtcggtcctgacactgcccctttgttatgaggaccttgggaaagtggcccaagcacagcggcactgcctacgggttgccagaaggatgccactggaccaggtaaggaagcacttagcggagtgcctgacacagagcagccactcagccaatgactggacggcatctgtgactgtaacacacttggagactaaggtccaggggtgagggagggtgatttttcagaagtcacagacagattggtggtagagccattgtgaattactcctccctgtattctgagttacctcccatgtgttggcctccagtgctggctgtattctctgccactagtagaatggtccttcttgcctggacttctgcgctggtcactttgggctacacaaatgcctgtagctctcctcgggacctaccttcatcctattctagaatgggtaggtatccttttatatctgctaaattacttttgattctaagagacagaaagtttaagcacactgacttaagcctaaaggggacttcatcactgaaataccctagggtagaacttcagtttcatagctggatccaggggctggactgatgtccccagagcttggcttctccctctggcttctctctcctgcagcctccattttcagataagctgtcctctaggggttgcaggatggttcttgaagctctcacctctcatctaagcaagtaagcaagccccacccccccgcataggactcccaaaaaaagtttcatcatagcttattgactcaggtaaagtgggcaacatgcccattcctgaaccaatctccatgtccagagacatgtgatggaagactggcagggctatttcctctgagttcctgtgagtatcattagtgcctctactcatgagtctcccaggaggaggaaagggtgggttgttcagtagttttcttagccagaacaaattttcactaataaatctgtacttctgcgctggagaacagtgaaatgtgagtgcaggcagtgatcacacaaggagactaacacatcaaattcagccctccgatggacggagagtaactgcactggatcttcgaatgtggattcattgtcagcatgaaatattggcagagttcccatagacattctggttcccagcttccttggtaaaattgggttgcggccagagaggcatgtccctagctttgccctgctagtctttacagcaggctacagaacctgccttcactgctctcagttactgcctgggtgctgtggccggctaagtttgcaacccctggtggaagtccactcagtgttcataagaattcccctcaatctagagcactgttcagagtgagtgcctccttgcagctgagccctcacaccaggaatgccacttctcccatctccaaagagtgtcacagcaggcctgggaggcagatgggctgtttgggggaaggaagctgaagactgatgaggtcgaaggataccgaggtagaaacaagtgttaacctgtgtagcccaggcagtgggaggtagaagaggagggctttcctcagaccctatccctgggcctaaaatggaagaaactcagatatagggccctatgaagtccaaacggggagcaattaaaaggtgcacggggccaggagcagtggctcacgcctgtaatcccaacactttgggaggctgaggtaggcagatcacttgaggtcaggagttcaagaccagcctggcgaacgtggtgaaaccccttctctacaaaaatacaaaaattagctgggtgtggtggtgggcgcctgtaattccagctacttgggagactgaggcagagaattgcttgaacctgggaggcggaggttgcagtgggctgagatcgtgccactgcattccagcctgggcaacagagcaagacagtctcaaaaaaaaaaaaaaaaaaagaccgtggtcagcatcttctgtctctccaccttccccatctccctgcctagcgggaggacaggagcagcaccaggatggcagacatgacacctaggctgctgggcagtttcaccttccctccatccacacctttccccacaaccctgggggtcccctgaaaatccgtttctcaggctgacagctgttctgtaggtgtgggatgggggctggtgttcaggtaagccaacccagatgacagcaagacagacaactttctcaaaagtaaaatacagccaggcgtgatggctcacacctgtaatcccagcacttcagtaggccaaggcaggaggattgcttgaggccaggagttctaagcctgggcaaatagcaagaccaccaaatttttaaaaaattagctggacatggtggcatgtgcctgttccagctatttgggaggctgagcaggaggatcacttgagtccaggagtgggttatggtcgcaccactgcactccagcccgggtaacaagggaagactgtctctaaattaaaaaaaaaaaaaaaagtaatcaatttccctcttgtggtggcatctcactcccacatacaccctaaatctgccccttcctctccacctgttttgccttcagcctagacctagccccatcattcttacctggacagctgctccttctttttaactattatggttatttttagagacagagtctcatgctgtcactcaggctggagcacagtggtgcaatcacggctcattgctagctcaatctcctgggctcaagcaatcctcccacctcggcctcccaagtaactgggaccacaggcacgaaccactgtgcctggccagctcctttctttctcctggactcccgccagccactcttgccctgccacacacccacaacctgcttaaaatctgcaaatggcttctgatttcacagggataaaatccttactatttgcagaggcctaagaggcctttagtgatgcatctcccttcatttttgccgctcctgccccatgtcagatgctgggggtgcctcaccccttccacctgtcctttgctgaggggcagtgccctgctccacgctccaccctgtggcctagaactgcacctgtcacagagtgggtgccaaatgaaggaataaatgcatgaatgcatgaatgaatgaacatggtttggaaacaatttgagcagtctgaacttctgtttatcagtaaagacaagtatttttgaatccctatagacctcatttaaaaatttagcttgggtacaaggatggtgcggagaaacgggaaagttggcattattttacagtttatttaattctctcctcctgctggcactaatttaattcatctccatagctaacggaaggacggaactgaaatattaacctcaaaggcggtgcggaagcagataatggggctgtgcctgcaagcacagagtagaaagataaaagagagggacggctgcttccaggggagaattatgcggggagagaagtatagaagccttttttctaatggttcatttcctttctctttagtccaaagtgataaaagcaaataaatttgtgtttagaatcacagacatagtacaggaccattataaaaagacatcttcccagtgaaactttgtcagaagttcttaatgtcaaaagcgtgcaaagtggattaaaatatcacaggcaagcagcagagattgtcaaaatgacagaagattattaaacctgtatatttatcccttcattttcatctccacatgagaccccagcgtggtgctgtttctgtgtgaagccctcggccacgtggccagctgaatgtgggcggggacccgcctgggcagagcccaagatgccgtcccagctccccggcctctggcttgaacagagtccaatctaagagtcagaatacacagagaaagtggcccttctgcctggctgacatttagctgtcattccttccctcctgagggaactcgtgggcagtgacagcagaaaacactgcagggagaaggagcgggagtgcagggccagctgtgagattggcatggggtgactccttctgtctgcagggtccctggggaaagaagagcaggtgggcgcctcgaggctcctttctctctgggtgagttctagcagctaccaccgatggggagtatcctctgtgcctggctgtgtacctgggctttggacgcattctctcatttatcctcatcacagcccctgaggagggggctgttgtcctccccatttgacagatgagaaaaccatggattagaggccaagaacttggccagggtctgcagctgacacctgatggcgctaggttacagcccagctctgcccgattccaaaacaaagcaatccctccgtggtgccccctctaaggcagctccaggggtaaaaagcatgtagtcactgtggacgcatagatagggatacagaaagctcttcaggacagcatgtccagggcacaggcagctgcagagcagtggctccaggctggaagagctcaatacgtctgcattggcttataacagctctggaaaggtgctcggtgggaacaggtgggccagcagttgggagctgggggatggaggcaggaagggaagcgagaccttcatttcactgttgaccctattgtgctgtttgaatttgtctttctgtgtgcatggatttgaaaacacatatggtaaaacaacatgaaaagtagcttggctagatggaaaaagaagcctgggagttcgcctcctcacctgacctctccctattgcacacacaccttgcttccatctgccaggctggggttgcccaggcccctgcctcatttctgagccaggatctcctcagggctctttccctcttcactcgactgcctgctctcctctccctttcagcacaagtcttgctcctcttcagcctcagctctatttctgcctcctccaggcagtctttcctgactacccaaagccctctgtcctctctcaagatggtgcccagcaaagaaaactttcctgtccatagcccagactcacagcctcactggtatggtttggatctgtgtccccatctaaatctgatgttcacttgtgatccccagagttggaggtggggcctggtgggaggtgattagatcatgagggtggtttctaatggattagcaccatccccctagtgctgctctcatgatagagttctcacgagatctggtcatttaaaagtgtagctcctttcccctctctctctccctcctgctctggccaggtaagacgtgcctgcttcccttttaccttcagctgtgcgccatgattgaaagcttcccaacgcctcccaagaagccgtcacacttcttatacagcctgtggaactctgagtcagttaaacatctcttctttattaattgcttgtctcagatgttttttcttcctgtttttctttattattattattattattatactttaagttctagggtacatgtgcacaacttgcagatttgatacataggtatacatgtgccatgttggtttgctgcacccatcaactcaccatttacattaggtatttctcctaatgctatccctcccgctctgcccaccccacgacaggccctggtatgtgatgttacccgccctgtgtccaagtgatctcattcttcaatttccacttgtgagtgagaacatgtggtgtttggttttctgtccttgtgatactttgctgagaatgatggtttccagcttcatccatgtccctgcaaaggacatgaattcatccttttttatggctgcatagtattcctggtgtatatgtgccacattttcttaatccagtccatcattgatggacatttgggttggttccaagtctttgctattgtgaatagtgctgcaataaacacatgtatgcacgtgtctttatagtagcatgatttataatcctttgggtacatacccagtaatgggattgctggatcaaatggtaattctagttctagatcctggaggaatcgccccactgtcttccacaatggttgaactaatttacactcccaccaacagtgtaaaagtgttcctatttcttcacatcctctccagcgtctgttgtttcctgactttttaatgattgtcattctaagtggcatgagatggtatctcattgtggttttgatttgcatttctctgatgtccagtgatgatgagcattttttcatgtgtctgttgggctgcatagatgtcttctttttagaagtgtctgttcatatcctttgcccactttttgatggggttgtttgttttttcttgtaaatttgtttgcattctttgtagattcttgatattagccctttgtcagatgggtagattacaaaaattttctcccattctgtaggtttcctgttcactctgatggtagtttcttttgccatgcagaagctctttagtctaattagatcccgtttgtcaattttggcttttgttgccattgcttttggtgttttagtcatgaagtccttgcccatgcctatgtcctgaatggtattgcctaggtcttcttctagggtttttatggttttaggtctaacatttaagtctttaatccatcttgaattaatttttgtataaggtgtaaggaagggatccagtttcagctttctacatatggctagccagttttcccagcaccatttattatatagggaatcttttccccatttcttgtttttgtcaggtttgccaaagatcagatggttgtagatgtgtggtattatttctgaggcctctgttctgttccattggtttatatctctgttttggtaccagtaccatgctgttttggttactgtagtatagtttgaagtcaggtagcgtgatgcctcaagctttgctcttttggcttaggattgtcttgacaatgcaggctcttttttggttccatatgaactttaaagtagttttttccaattctgtgaagaaagtcattggtagcttgatagtgatggcattgaatctataaactaccttcggcagtatggccattttcacaatattgattcttcctatccatgagcatggaatattcttccatttgtttgtgtcctcttttattttattgagcagtggtttgtagttctccttgaagaggtccttcacatcccttctaagttgtattcgtaggtattttattctctttgtagcaattgtgaatgggaattcactcatgatttggctctctattattggtgtataggaatgcttgtgatttttgcacattgattttgtatcctgagactttgctgaagttgcttatcagcttaaggagatttggggctgaggcaatgaggttttctaaatatacaatcatatcatctgcaaacggggacaatttgacttcctcatttcctaattgaataccctttatttctttctctcacctgattgccctggccagaacttccaacactatgttgaataggagtggtgagagggggcatccttatcttgtgccagttttcaaagggaaatgcttccaatttttgcccattcagtatgatactggccatgggattgtcataaatagctcttgttattttgagatatgttctatcaatacctagtttattgagagtttttagcatgaagcgctgttgaattttgtcaaaggacttttttgcatctattgagataatcatgtggtttttgtcattggttctgtttatgtgatggattacatttattgatttgtgtatgttgaaccagccttgcatcccagggatgaagccaacttgatcgtggtggataagctttttgatgtgctgctggattctgtttgccagtattttattgaggatttttgcattgatgtccatcagggatattggtctaaaattctctttttttgttgtgtctctgccaggctttggtatcaggatgatgttagcctcataaaatgagttagggaggattccctctttttctattgattggaatagtttcaggaggaatggtaccagctcctctttgtacctctggtagaatttggctgtgaatccatctggtcctggacttacttttgttgataagctattaattattgcctcaatttcagagcttgttattggtctattcagagattcaacttcttcctggttttgtcttgggagggtgtatgtgtccaggaatttatccatttcttctagatattctagtttatttgcttagaggtgtttatagtattctctgatggtagtttgcatttctgtggggtcggtggtgatatcccctttatcattttttattgtgtctatttgattcttccctcttttcttcttcattagtcttgctagcggcctatcaattttgttgatcttttcaaaaaaacagctcctggattcattgattttatgaagggtattttgtgtctctatctctttcagttctactctgatcttagttatttcttgctttctgctagcttttgaatttgtttgctcttgcttctctagttcttttaattgtgatgttagggggttgattttaggtctttcctgctttcttttgtgagcacttagtgctataaatttccctctacacactgctttaaatgtgtcccagagattctggtgcgttgtgtctttgttctcattggtttcaaagaacctctttatttctgccttcatttcgttatttacccagtagtcattcaggagcaagttgttcagtttccatgtagttgtgcaattttgaatgagtttcttaatcctgagttctaatttgattgcactgtggtctgagagacagtttgttgtgatttctgttcttttacatttgctgaggagtgctttacttccaattatgtggtcaattttagaataagtgcgatgtggtgctgagaagaatatatattctgttgatttgcagtggagagttctgtaggtgtttattaggtctgcttgttgcagagctgagttcaagtcctggatatctgtgttaaccttctgtctcattgatctgtctaatattgacagtgggatgttaaagtctcccattattattgtgtggcagtctaagtctcttgtaggtctataagtacttgttttatgaatccgggtgctcctgtattgggtgcatatatatttaggatagttagctcttcttgttgaatttgtaatggccttctttgtttcttttgatctttgttggtttaaagtctgttttatcggagactaggattgcaacccctgcttttttttgctttccatttgcttggtagatcttcctccattcctttattttaagcctatgtgagtctttgcatgtgagatgggtctcctgaatacagcacagtgaggggtcttgactctttatccaatttgccagtctgtgtcttttaactggggcatttagcccatttacatttaaggttaatattgttatgtgtgaatttgatcctgtcattgtgatgttcgctggttattttgctcattagttgatgtagtttcttcatagcatcaatggtctttacaatttggcatgtttttgcagtggctggtactggttgattctttccaggtttagtgcctccttcaggagctcttgtaaggcaggcctggtggtgacaaaatctctcagcatttgcttgtctgtataagattttatttctccttcacttatgaagcttagtttggctggatgtgaaattctgggttgaaaattctcttctttaagaatgttgaatattggtccccactctcttctggcttgtagggtttctgctgagagatcccctgttagtctgatgggcttccctttgtgggtaactcgacctttctctctagctgcccttaacaatttttccttcatttcagccttggtgtatctgacaattacgtgtcttgaggttactcttcttgaggagtatctttgtggtgttctctgtatttcctgaatttgaatgttggcttgccttgctaggttgaggaagttctcctggatagtatcctgaagagtgttttccagcttagttccattctccccatcactttcaggtacaccaatcaaacatagattcggtcttttcacataatcccatattttttggaggctttgtttgtttctttttactcttttttctctaaccttgtcttctcactttatttcattaatttgatcttcaatcactgataccctttcttccacttgatcgaattgggtattgaagcttgtgcatgtgtcatgaagttcttgtgccatggttttcagctccatcaggtcatttaagttcttctctacactgtttattctagttagccattcgtctaatcttttttcaaggtttttggcttccttgcaatgggtttgaacatcctcctttagcttggagaagtttgttattactgaccttctgaagcctacttttgtcaactcatcaaagtcattctccgtccagctttgttccattgctggtgaggagctgtgatcctttgcaggagaagaggtgctctgatttttagaattttcagcttttctgctctggtttctctccatctttgtgtttttatctacctttggtctttgatgttggtgacctacagatggggttttggtgtagatgaccttttgttgatgttgatgcttccttctaacagtcaagtttctcagctgcaggtctgttggagtttgctggaggtacactccagaccctgtttgcctgggtatctgtcggcccctactgggaggtgtctcccagttaggctacatgggggtcagggacccacttgaggaggcagtctgtctgttctcagaaatcaaatgctgtgctggaagaaccactactctcttcagagctgtcagacagggatgtttaagtctgcagaagttgtctgtcttcttttgttcagctatgcccttcccacagaggtagcatctagaggcagtaggccttgttgagctgcggtgggctcctcccagtttgagcttcccagccactttgtttacctactcaagtctcagcaatggcagatgcccctccccaaccaggctgccgccttgcagttcgatctcagactgccaggctagcagtgaggaaggctctatgggcgtgggacttcccgagataatctccttgtctgccggttgctaagaccttgggaaaagtgcagtatttgggcgggcgtgtcgtgtttttcaaggtagtctgtcacagcttcccttggctaggaaagggaaatccaccaaccccttgtgcttcctgggtgaggtgacaccccagcatgcttcagctcaccctccatgggctgcacccactgtccaaccagtcccaatgagaagaacaaggtacctcagttggaaatgcagaaatcacccatcttctgcatcgatcacactaggaactgcagaccggagctgttcctattcagccatcttggaacgcccctccccacccccaccctttttttttttttttttttttttgagatacattttcattctgttgcgcaggctggagtgcagtgacaagatctcggctcactgcaacctctgcctcccgggttcaaacgattcttctgcctcagcctccccagtagctgggattacaagtgcccatcaccatgcctggctaatttttttgtatttttagtggagattgggtttcaccatgttggccaggctggttttgaactcttgacctcaagtgattcacctgccttggccttccaaagtgctaggattataggcctgagccactgcgcccggcatcagatatttcttgatagcaatgcaagaacagactaatacactcaccatccttgggtcagctcataagggcaggccacgttctatccttccttcatcccctcctcagttaattgggaagttcagaagaaacatctgtgttaaggttaactgagcacctgctacccacagaactgaatacgctgagctcgctgtgaagctaagggctgggcctggggctgcgggctattcaggttaggcaaagggaggaggacgggaagggccattttgagggctggctctctgtttagcaagggtgacctaagtagagtcagcgcagggagatccaggtttgcaaggcatgaatcttatacaatctggggatccagtttaagaaaaagagtataatattataaatactaaattttgtatgaaaatgaatttctattatgagaacataaatcacaacaaatattagaggcttagacattcaggccccttttcagatttctttaggcaatttgccagaaatacttttgcagacacattttatgatagcgccctggccctcctccccacccaaagctctgctgaagtcccaagctgccagcagatgagagggtctgatgcttcattaacttcataatcaattcatctctttggagaagatccaccatgccaggctgccttcgtgaagaatgaaaatgacaaatcaacagaaaccagctgtgatccagtgaacccagctcctatgatcccacccagtgccctcctggccctgggaggggcagagcagctcacagcaagcctcagccttgaaaagcagggttagaatccttggcacccaggccagggcctggtgcataggagagactcagcaaaaggtatgtgaatgggtagatgatagagagtagctatagggagaaaccagctgccagggctttacaggagagggggctcagagcctgatggctctacgtgtgcatttaatcaaacatttaagaagaaataatgccaactgtacacctctatgctcactcttctagaaaacagaagagtagaaatggcactctgacccagcttcatgaaactagagtcagatatttggtatcacgtttttttttttttttttttttttttttgaaatggagtctcagtctgtcacccaggctggagtgcagtggcacgatctcggctcactgcaaacttcacctcccaggttctagcaattctcctgctgcagccttccgagtagctgggctcacaggtgtgcaccaccacgcccagctaatttttgtatttttagtagagacggggtttcaccatgttggccaggctggtctcaaactcctgacctcaagcgatctgcccacctctgcctcccaaagtgctgggattacaggtgtgagccaccatgcctgaccggtatcacatatttctgataccaaagccagacagagaaacttcagggaaagaccaatattactcattaaataactatatatgctagaatgtctgaaatgtgaaagtattcactgtctggagaatgtggagcaactggaaatctaagccacagctggtgggatgtaaaacagtgcaatcactttggaaaacagatggacagtttctttaaaaattaaacacacatgaaaaagacatacacgtttcatgtaaacccatgatttcactgttaaatatttatccaatagaaatgaaaacatagggccgggcgtggtgaaacctggccggcatggtgaaaccctgtctctactaaaaatacaaaaattagccgggcgtggtggcaggtgcctgtaatcccagctaatttggaagctgaggcaggagaatggcttgaacctgggaggtggaagttacagtgagccgagatcgtgctattgcactccagcctgggcaacagagtgagactccatcttaaaaaaaaaaaaaagaaatgaaaacatagatgttttcatacaaacacttgtgtgtgaatgttcctaacactttcatttctgcgaaacttgacactgaagtgagcatccatcagtgtgaacagatgaagaagctgtggcatggccatataatggagtgttatccagcaataaaaagtctcaaaataattgtgctcagtgaaaaaagccagacacaaggagtgcagactaattgatgccatttacatgaaattctggagcaggcacgctaatctgcagtgactccaagcatcccagtgtttgcttgaggccaagaatggagggtgagattgtctgcaaaaaaagagaattttgggggtgattaaaatatgctacatctcagttggggggaagtggtcacaggggagtgtttgttaaaacttaaaatgtacaataaagtttattttaaacttgaataaatataaatgaataaaaacacacagtttcaaactctactcctaaatattttgatttaatatttaatgtctgggtagataaagcctaggtattttttataatgctcccctggtgcttctggggtaagacccaggttggtgaaggaattggacataacttttgaaaaggtcaatggagtcaggtcacttctctgctcaaatcttcacaaacacatcccatttccatctttgcaggttcgtctcagaatactctgtgtctctctcactgtgactctgccacctggactctcacccattcctttattgtccccagtggttctgctggttcaggctgcacgttgccctttggcctgcgatgctcttccctgcacagggccgcatgatttctgacattcatggcaccttcctcagcaaggcctcccctgacctctccatctgtggtcaccctccatccccaggctctctcttcatttctttgtttcattttcttcacagtgcttattgctttgtaaaataatctagctgtttcattacttgtgattcaccctctccgtagtttataagctcaatgagagcaggagctttgtctgtcttgttctctgcagtatcttgtcccccaaatggtgcacagtaagtgcttaagaaaatccagctggataaataagctcacagagttgttgtgaggtagtgaaactgaaagattcaccattgaccactgaagaaaaattacagaaaaggttgaataaatcttagaacgtgactacaagcagtgaaggaaatgcagtgcttcattttcttctttcactttctgatattttcctaaatccttgcaaagagcaaaaattgtcatgaactcctatgagtacatctgtccagccaatcagccaccatccgcctctccagaaaccaccatacggattcacagggaggagtccctccaaggcagcccttttataccccatcctccctggacacagctaactggagaagcagcagacaccttgcccttcctgggcaaatcagatcctctgcaggtggctagctaaggtgggaagttagctggctcctcctagtggagggagaaggggctaagaaagtggaatgtcttgcaccagtgggaggggagcagggcaaatgcagaaagcagcaggctagaccacagggctctcctgttccaaggcctgcttagctcaaacacgtcctcaccttagaattccctctcctagaaaccatccattctgttttgttttgttttgttttgtttgttatcttttttgcttgggctcacttgagtgcttctattagttgatacaagaagaattgtaactaatcaaacctccattactgtaataataagaaaaatagtgctataagaattcaatttacatacaaacatttttaatatgagtacgtatttacaaccggaacataaagagaggtccccttgtagtttctattgtgccattcttgacttgcaggttctctctcccctagtccaggatgcccttggaaatgtctgatttccaaaccaaagccagggctgtgggaatgctgatggcgatgtgggtgactgggtcccaggttgtctcagccttgcgtgggagcagccgtccctgaagacaccagtgccccatgcctgctcagcactaatttgagctgtgacaccattttccaagctgtcaccacctccagcaacaacagaacctctctggggggagcagggagggttggtattcaatttccctcctctgcttctcaagagttgagttcccaagttcaaagacatctatcatggtgagtgatggattgtatttcagagcaggttggcagcaggagggaattggatttagaaacaaccatctggcttttgcaactgtgtgccctttggcctgctcagcgtcaagcctgctgtcacacaatctgagtagccctgggagcagacccgaccctcgtgtccagcccagacaggtctctgtgctggagaagtagacagcactcaggaagctagtgaggaccccatggggctgctcatggagggagttggggctgagcacagagatctttttgagagccaactatatgctgggcactggggagacagactgaagaagacaaaatgcctgcccaccagcaacactcattcattcattcattcaaaatcatttagtttttgtgtgtgtgtgtgcctactaggcccaggcattggcaagtttgcttcccactggacaatgggcagctctttgtctctgaaatcgcactgttggggctcagatgccaactccattgccttgtttgttgtgcaacacaggcaagtggtgctgattggcggttgaacatcagcaccttccctctctacagcactgtgtccccccctgctggttgggggtaataataacacccatctatctatggtctctgaaacagtgtcgacagggcacctgtgagtagtaaatgttcactaatattagctggtaatactttttaaatttgcttattagtttttgtttttgctgttaccacttttattgtgtccatgcattctttactcagacacaattctttgaccacctttttaactgacttatcaattggtgtgatatccttacaccatccattttagtagccacagcaatggcagattttaatgcaataactcacactaataaggggtgtccctcttcgcatgtaatctcccttgggtccccataagctggggctctgggtggttccagagtctcacaaatgcaacatctcaatgccatctgtgtggtcagcagcttgacactccggctgcattttccattctgtgagcagattgggaggcagccaaggtgagtatcagcttttaggatacctggggagagactgtgtctcctcactgcttagcaaagagtggaagaacaaccaatcagtaggcagtaggccatgacagcacttgcagctgacaagcagtgtcactctctgtcatgttttcaaaaactctttaggggtagcaagctctagaagacaccaggttatacacgtttagcagaggctgcatgcaggggcaaagaacttgcagtgtgtatgctttggcctttcattgagatgaatcctaaaagtagaaaaaacgccaggcatggtggctcatgcctgtaatcccagcactttggaggccgaggcaggcagataatctgatcacctgaggtccggagctcgagaccagcctgaccaacatggagaaagcccgtctctactaaaaatacaaaattagccaggcgtggtggcgcatacctataatcccagctacttgggagggtgaggcaggagaatcgcttgaacccgggaggcagaggttgcagtgagccgagatcatgccattgcacttcagcctgggcaacaagagtgaaactctgtctcaaaaaaaaaaaaaaaaaaaaaaaaagtagagaaaaataagaaaaagactgggtgcagtggctcacacctgtaatcctagcactttgggtggccgaggagggcagatcacctgagctcaacagttcgagaccagcctgaccaacatggtgaaatgctgtctctgctaaaaatataaaagttagctggccgttatggtgcatgcctgtagtctcagttactcgggaggctgaggcaggagaatcgcttgaacctgggaggtggaggttgaagtgagccgagattgtgccactgcactccagcctggacaacagagagagactctgtttcaaaacaacaagaagaagcaaaaacactttgggaggttatttatcctttaccctcaagggactctcatctgggtagtaaaagaataaaatcgtttgataaaacagtataaaaagatgtttaaaccctagtggtgtgtagttgtgtgtgtacattagtgtgtgtctaacagaggccaagaatgagacaccagccaatgacatcatccacactgaatacagaaatcaccacattagctaacatttatggagtgtttattgtgttccagacactgtactaagtacttctatgtgcattacctcatttaattatcacaacataataatgtatgtaaaacacttaatacctggtgctgagaaggtgctgaatatgaaactgtcaccattactattattaattattattgtttagattatcatccccagtttcccgatgaggaaattgaggctcagggatgcaaaatggccttcccttgttttttaattgcaaaacgatctcaaacttggtgtgtgtgaatgtgtgtacgtgcacaaatctaaggatagaaagaatggaaagtgacctttctcctgcacctttctagcactgagaatgtagtagccactgccattcattcactcactaagtcctatttcgttttcttagctgacagatcaggacacaggaggatggaatataactcaaataacttttccagagtcacggagtgagacaggcgtggagttaaattcttccaaggtgggtgagcatgaacccaaagttctcctccactcagacaattcatcctgtaagactcaagatgctcaactgcagagtggtcatgacatgactcctgcatgctcaaagccacaggagggccagaagaagctatgcatgtggacacctcagtgggaaatcctgtccactgcgtaagcacccaagaaacagttgggtctcctcttttagtgtgaaagtgcagcatctgttcacactgtggggtgagcagtccacagagcagagcccacggttctgcaatccggggctctgccccgtgcccctctctggacacactttggcaaggacatggttccagtccactgctctgtgcccagaggatatctcaagccccacaatcacccaggaaaatggctttagttccagaaccagagagaaaagggaggcttcctggggaaagacaaggacagctagaggttcatttctgcccttggttctcctttctgcacgtcatgtgtaatcctgtctctaaatacctccctggctcagctgggcattctcatgccaactgggatgaagagcagctggttcaggctgtgattggttcctgggacctcttcttcccctactgccaaggctgcagttgccaccaaatgatggtttcccctccccctgacactgcctggagcccagctgacttcacacttcactcctccctcctgctcaccagtgataagaatagcaaccacagcatcaccccaaacccctccagggtgaaggaaggggcagctgtcaccttaagtgtcaactccaggtccttgtgagctatagaatcaggtttgagaaacaccctttggttggggaagtaagcaccagacaccccctgctggctgaaagtggaattcaggttcgtggtcccgctgcagcctgggagagctccctaatcttcatggacatcattatccccattttccagatgaggaaacagacaaagaatttgcccaaggcaccactgctagtcaatgatgccctccaggctaatcccattccaaatctcctttttctttccgagggactgcctaaatatctagatgttccacacccaacctttcaactctcccttcctatgccttttgattcagtaaatgcaccgtttgtattcccttggaaattccactctggaaggagaatcttttgacagaggcgtgctgcatcctgagacgctgagccgatgcaatcactcattatctcattgatgcagggcagaaggtcccctcccttccagcaggccacagaggaattcctcggaggatgcagatgctgcatgtcttgacttccaagccagggaatttctgcctttgtgcctgcacctgtattaattaatcattcttctaacactggctgtgtctacatgcattattctaaaagacaattctattcttaaaaataagctaatttaagccagtgatctgctgctttttcttttttctttttttttttttttttgctaaattttggttttaaaataaaatcaatcttaagaatagagaattcaataaggcaaaattcttgaaagaagcttatcatttattcatttatgtagcatgtatgtgacaagaccaggctagcaatgtagggagtggatcaaatagaactgacagcaaaggcccccagtctaatatgcggaagaaagaaaagacaagctcactgcagaatgcagagaaacacatcacacaggcaaataaaatgttccttgttcccattttcaccccttaacagcaaaaaaaataaatatgcattcatcttacagggcataaaagagaggtctgttcaattgtcaaatctagagaaacttggtggtggaggcagaattcatgcctatgagtttaccatcaattgctgagattattagaacaacacggacatgcttgggagtggagaggggactgagattagcatcaccagggaagtgcaacggtgggtgggttccttcttgtaggggagtgagcaggtgttaattgccattgcttgtgcaatggcatggataaggttaggctagcatttggcatccactatctgtaaagaaagggttttttaatagtcctcacatgtctacagggtgtgacagatttaaattagataagagataaattgttttcagggacaaattaaacaaagcagttaatgatattacaaatcactctcagctgtcattgaagcagtcctctgatgttgtccatgaggcccagttctgtccatctgcaagctgctgtggggccctgagcacagaccttgcagctagaccatgtgggcctttcccaggctctgcgcttcccaggctgtgagcctgtgatcacctcacctcacatcccggaacctcagcgctgcatctgtgaaatggggctagctcccccatctcctcagattgaggtcaacaatgtgatgtcataaaaagtgttcgctaaacacggtcaccactatttaaaaaacaatcacgcaagcttggggtggatgtgatttgtctgtgcaaagggtcgacagtggtggcgtgcaatgatcgcctcacattaccgagtaaggtggctctgccaccatcattcttgttgacttctgggggagggatggagtcccaaagaaaagaaaagaaggtcccagggcctctgggaaagaccacattacatggtgtgggttgtgttcctgaatgtgtccatactggaatgtgggtctctggaggacggatgttcccagtttctctctgcaccactcccaccccactcctaacgcttctccttgactggaaggaaacatggcctcctctctcctcggggttcatctcctatgggggcttccttcctcctggagcctggagagagatgcggggggcaagggttgctcccacttttgagcaagtcctgaattttatctcccaccttggcctgcgtgcaaaggacagggtacctctcatcttagtgttctgcctcctggatgtgcgttggacattccaggctgtctctctgtccacattcatgtaaggccccaacacacagctgcttattctgcagggtgactcctgatcaaggccagactcagcaccactccagattgtgcactgtctggggcagggccctccgtgtcgcctttctgagcccctaacagatctcgttcaaagccggacccataatcaatgctcagagaaagtgttgaacagacacatgccccaaagagtctgagcttcttcacttaaagtttcctgggctctgcctccatcctcagaaatgacccatccatttcaaaaagaggctctccaatgtcaatactgcacctccccaggatccaaatccatttccctgctcctccagcacagcacaattaataaacgtcccactggcttgccattccaggttgggagctcacagcatcccttgaaaccatgctggcagagaatttgtcaccgtcaactcgctgctcctcccgtggtgccacaccccagatgacacagagcatggcctatgcctgtcagcagaccctccactgctgctgttgccagcccccaggtctcatcctccttccagggtcacctttggaaatgctgcccactgagtaagtgcccaagaaacaatcaggtctcctgttttagtgtgaaaatgcaggtctgttcacaccctggggtgagcagttcacaaagcagagcccatggttctgcaatccagggctggctgtgccctgcatccctctctgggttgtgaggttgtgtgggctgtggatccatatcacatgccaaatactcttcctggtgagagggatgcagagatcagcagacacacgccaagacaccaataaactggcagccacctacaatccagagcatgtcagctggtgacaagggctgagaagaacacccagagtggctgcgtggccagggcggcatcctgaagaggagattgccaagcagtgctggaattgtatgagtaagtcagccagggacagtctgaagagtgtgagccaagtaaagggaacagcacacgcaaaggccctgtggcaggaatgtggttggcttggtctggaggcagaggaagctgagtgacaagagtggagtgacaagggggaagagagaggcagaggctagaacaggtagggcctgtgagccatgggatgagcttctctaaaattcagccccctgaattttagattcagggggtccaaatgcaggtgcgttccatgggtgtattgcctgatgctgagatttgggcttctgttgaacccgtcacccaaatagggaacacagtacctgacaggtggtttttcaaccctgttccctccctccttccccactctagcagcccccagtgtctaatgttcttatctttatgtccatgagtacccagtgttagctcccacttacaagtgagaacatgtggtatttggttttctgctactgtgttaattcactttggagaatgacctccagctgcattcatgttgctacaaaggacatgatttcattattattattattattatttgagacagagtctcactctgtcgcccaggctggagtgcagtggtgcaatcttggctcactgcaagctctgcctcccaggttcaagccgttctcctgcctcagcctcccaagtagctgggactacaggtgcccgccaccacgcttggctaattttttatatttttagtagagacggggtttcactgtgttagccaggatggtctcgatctcctgacctcgtgatccacccccctcggactcccaaagtgctgggattacaggcatgagccaccgcgcctggccctcattattttttagagttgcatagtattacatggtgtagatgtaccatacttttcttagcccaccattggtgggcacctagattgattccgcgtctttgctattttgaaaagtgctgccatgaacgtacaggtacaggcgtctttttggtagaatgatttattttccttggggtacagacgcagcaattgtattgctgagtaggatggtagctcggtttttcattcttcgagaaatcttcaaactgctttccacaggggctgaactaatttacattctcaccaacagtgtataagcactccctttgttccacagcctcgctagcatctgtgatgttttgactttttaataatagccattctgatgggtgtgagatggtgtctcattgtggttttgatttgcatttctctgacgattcgtgctgatgagcattttttcctatgtttcttggccgcatgtatgtcttcttttgagaaatctctgttcatgtccttcgcccaccttttaatgggattatttctggtttttgttgttgttgatgtgtaagttcacagaaggagtttccatctgaggctgagagtgggcagcagaggggcgccgtctgatacagaatatccagaatgtctgcagttcccttggctacccacaccgcggggcttgagggacaggagccggcacaggagagcttggctgcagtgtggacagtggtgggaggctggtgggtgcagaaacggggaggtcattcaggaaacggtggcaggcgtcatgaagcaagtacggaggctaggcccgcgggggaggctatggggaaggagagactgtgggcagctccagggagggcggcccagaccccgagacagactgatgggacccgtggagagagagggcgagagagggatggaggggctgcgaggcgtccagcctgcataacaggtgaacaaatctgcctctctaaacacgagatctgcctgcagggaggcgacttccctggttcagtcccctctgatagagaccggagaaaaggccacctgggcaaagcttcccaggtggggcgagcagctgtgggaaacggtgcgcactggagcaccctggccagccagtttttctctgtgtttgcagaaaatagtcatttcctcctctttcttctttttattgccaggagagaagcatttccgcgaagccccagtgcacgtgatgggaacgtgctcccacttcctatgagttgctagaatgccgaacagtctttgtgaacgcaaatggatggccttgtcagcagcgagaatatgtgcagaatatacagtggcattagacagggaggtggccggcatccatggagcagatctgcatgggtacagcccgagggtccggaggcgggctggagacctactctgcctccgcccagcttcctcatgctcgagcctgctagggcaggactcagcccagagagcctgctggatttggggctctgtgtggaagggcgaggagacatcgcagtgccactctgacactgcatacattttcctaaagcacaggaaaggaaacagaaggctccagggagccccaggacttgacctctgggattgggccattctaagggcaggctcagcagtctctctgctctccaggaaaggcgttccctctacgggagacagctctgggcttgctttgagggctccagactggattcagcatacgcgggagctgggggagggcggcttgcaaggcggtgagctccccgccactggaagctggaagctacagggaagcttccgcggaggactggcgatggcttctttgctccaacagctgctccttgtgccaggctcaggctgagttacagctagaggtgcagtggctacaagagtttctgctcacggtcatggaagagaaagaaaatgaacaaggtaagtgccatgaaaaaaaaaaaaaagaggcatgggggagaggtgggggattttgcagcttggtccccagcagagaagagccatttgctgaaaaggagtagcactgggtgcatctggagcagcggcagcccacgcagagggaacagccactgccgaggcccagaaatggacattcgttgtgacattcgatgctgctgagatgacatctagcagttggtgccttcccctccaagtccagagaaggaggtgaggcctcaccgggggggcctatggcctggaaaaaacctgtgtaggtgtgatcttgttctggggtccactgggacgggggtgacaaccaggcggccaaagtggagcgtgggaaggggcgtgtcaaagctgagctctgtcctgcaggcctatgggccagcggctccctctgtcaggctggtgggagggggctccgtctgccatctccctcacccgcccccccttcccccccccccccgctgtggctgccagctctcacacccggcatacgctggattcttattttagctactgtgacaattctcaaaataggcaccaaagaggaaaaggtgagccttcccccacaggtgctggagggagggccactgtggggcacacaggcagcccctcccgacatggggtcttattgtgtttccctcacacttgcaacgggaacagagtttcaaggctgaaagtttaaaaactgcttcaggacttcacgaaaaccctgaatgaaagtgctttaaaaagtggcaaaaaaaagaaagaaaaagtaaaaacacccagaaagtgccaaagaaaaactgcaacaaagtagagaagttaaaaataccttaaagtaatggagaatgagagagtttaacattctcttaggaggaagatttaatccagcagctgacacaaagtgtttgcagtcgtggcccgggaatcacgggagttgaatcggagcccctgaagatcacgttcccaatgaacaagtgcaggaacagaggccacagcacatacccagggacatcagaacttctcacatacaggttgggtttgcgtgcatagaaattccttcctcttactaggtacaagcaaaccctcctgaaggaaccagagatcctagaatttctaggccatgtggacatcatcaggatcctcgttgctgtctcagttgtgcttacccttgggggactttcctactggctgagagagcagaaacaagacattaaaccaagctgggggtgtgccttccagctttgatgctgagccagaaagatgggggtggagacgccacttctgcagagcccagggatgccacttgaggatgctgtattcgtttttttattgctacatgacagattgccacaaatttagcattcaaaataatatgtttattaactcacattttccatggtccaggaatccaggccccaggttctgctcagggtctcacgagcctgaagttgaggggcccccgggcctgcattctcatctggaacttgaggtcctcttttaagttcattcagtttgttgtgagaattcagttccctgaggttgtagggctgaggcccctagttgtttttttttttgttttttttttttttttgctagttgcttgctgggcccatgctcagctcttaggaccaccctctgttccctgactcaggctcctgtcgttggtttacagtattgatgtctggcctcttccagcattgcaggaacatgcctcatgctttgaatctctctgaattccctgtctgtgacctctagacccagatttaaagggctcatgtgattaggtcaggcccactctgagaagctcccttttgttgactcaactgattagtgaccttaatcacatctgttagtcattcaacacagtgatcatgagaatgataccccaccaagttcacatattcacagttcctgccacgcttgaggggagggagtcacagaagctgtgcatacctggggcaggagtcttggggccaccctagaattctgccaccacaggcatccctgtgggaccaagccacagccatccagtggtgccctgacccctccatgtcccttggtgacctctcacccgctgtgctgtcactgacagaatcccagagacacggggctgtggaaacttcttctagtcatcttgtcagtgacaggaagggtgctttgccttgccctaagagtgatgcttaatgatctctcagttaactggcttttcctcaaggatctgaaagccaaagtcctccaaggttgatcactgagcccccacagcctattttatcatcaagaaggcataagtgtacaggttccaaagtcagacagctgagctgcctaccagctgtgcagctttgggcaagttgcctggcttctctgaggctcagttttctcattataaaatcgagacaagattggccctacttctagaatcattgtgaagattagagtctatttaaaacacttggcacagtgtgtggcacacacagtaagcagctggcacttgtgatatggtggcattatctctcatgcttctagagaggttggggtgaagatgtgtgcatgagtgtgcatatgtgcatgtggtcatgtaggtacatgtgctcgcatgagcatgtgtgaaagcatgtgcgaccatgcatgcatgtatcacgtgtgtgtgcattgtgcctgcataaatgtgtgaaagtttacatgtacatgtgtgagtgcaagcaggcggatgcacacaaggttcaaattcaggaggtgtgatgctagtcacagctcagttttcaagaaggtgcctggcatgggcaggaaggtacctggcattccactttctgcacctcagtttctccatttgcaaagcaaaagatggactagattttctctaagtactcatgcatctctaaggtggcaccatcctacatggaggccttccagaactttctttggctcttatttgatttgatcatttgtttttacatactttgtatatacatactgtatcagtcagaattttccagagaaacagaatcaaaaggatgtatagatagatagatagatagatagatagatagatagatagatatttagaaagctatttatcataaggtattggctcaagcaattatggaggctgagaagtacagacacaggagagctgatactacgaattccagtgcaagtctgtgcttgaaggcaggagaaaaccgatgtcccagcttgcagacagtcaggcaaagagaaagaattttcttactcagctttttgttctactcaggccttcaactgattggacaagctccacccacaccagagagggccacctgctttcttcagtccactgattcaaacgttaatgacatctagaaacacccttatggacacacccagaaataatgtttagccaagtatctgggcactccatggctcagtcaagttagcacataaaattagccatcacagttactttacgtacatttgcgtacaccaacgtacaacttttaaaggttaaaaatgtaggaaagatgcactcggtcacatttgtggaagctacgcttgacaagatagcaatgcttaatgtggaaggccaccatcacaccctttgtatcactctcccccaggccttttctccattctcctgaattgcacacttttcaagtcttctgatctgaaacatttctccccaattgaggcgatcggacgtgatctcagaccgtaatgtattgtagcttttaactgttgagccagactttctgactcagcacattttaatcaattttctttgctaagatcagggagatgtcatctataataatcccatctgacctcccaaagtcaggctgataaaaatattaatgtcagcttcttgcagcctggcagagagcaacacccagcttgacaagcaaacaaatggctcagagctgtctgcaggacaccgatgaacccgtattaatgaatagcttcatcagcaagcattgccctccaggcagagctgccacaggctggagactcataagaggctcagcagccttcctggcgaggtcttattgcccatcattggggccatggaacgtcaattagacatgtctgctaagatgattcaccctcctccataatgtgctccagttgggcagctgggatcacccaacatggctctttacttcttttattctccctgcctaggaaccctcccattgtcacctgtgtcaggtatttccagctgtgacatcagagacattaggccctctgagaacacttagcaatcctaaataggaataaaggattattcccaagggtcacaactttatgaaccttgacctgattcagcaaggagtatgtttatttgatcatcttgtttgttcatgcagtttctcaagaaacgattaccaggtagggtttgagtgactcacaatacaagcagttcagcatctccctaactcttgtccctctgtgaatatctatgcttcttgtctggacgctgcaggttctgagtttctcactcctgattttactggggccatggtagagcgaggcaaatgttaacgtgctcacatcacagatgcaatcacttgtccaggctgtgagtcggtgctggggcagctgcactgctggcctctggactctgactccagtgttcattgcattagccctctctcaagtccatctttctgtctctagtcttcagagcctgggacctttcattgtgaaagaggagaggacaagcttttcccatgcgggtgagcagcgaatccaagttgcctgtctccactcttcaaaggcaggaaattgtttcaccatgttccacaaaaggaatatggtctgcaaatggaagaatcatttgggaaagcagcttatgcaggagccccaggagggtggctgcagttgattcaatggtctcatgacggtgtgatgtgtgatgcagtagcctcctggcaaagaagtgcccccaagcagacccgctgtatccttggaccctgcagcagccaaactacaatacatagccacaggcattggctttgcccatccagtcccctctatacagcccattcatatgacctgagcactaaataaagacctcagaatggcagagatacagccagggagccgctgcttactaaattactaaaatgtaatgcctcactgggttggatgccggcattggcagggcttttgtttgttggtttgtctatttgtttagcaaaattagcaagcaaaattaaacccttgtcaccttcttcagccggaatgtgagctggaagaccattctccagagcagagccttcatttgcaggcttttctataactggggagcagtggagggacaggaggtggaagggcactgctgtaaccaccacagggcatcttactcagccccaggagtgaaagtggaaagaaaagcacaggcagagagacctgcacactttccctgctccctagaggaccctgccaatcccgggctgtctgggtactgcctcccaggagctctgtaggaaactggaaagggagtggttggaaacacagtctctgcagtcggagctggaacaagtcactgaatccctctgtgtctccacttccttgttttatctcaaggatgataatactagcatatatctcccagggtggttgtgaaggttcaataaggtgcatatgcaatatgcttagcaccaaaactggctcgtaattacatgcacaataaatgctagctttcattaatgctgtctgtcacgtgtgagataaagctactggtcccaggaggcctctactcctgctaggatgcagttcccttgggcaaatggtactcccagggctggtgcgcagcgcctctgagcagctgacagccaagattagatgagttaagactgtgtctcctacctccatttgcaaaatcctctataaaaaggtagagtaggtaaggtggaaggagagagtgagtcacccttcctggagcacaagccagcggcgccctgacccccacctgtgctgtgtcccatcaagctcccgtaagaggcctgtgtacatcctgctgtctttccccagcacagcctgctttgcacctcctccaagatcctgctatatggaggtgatttgggaggaagacaggaccatgggtttccctgacctgcctatttctttgtcctaaatagtgttaccgagccccaggtcttcaggcataaagggacctctcaggctgggacaacacagtgcatcttagagggagccaccatgaactctggaaccttggtgccacgtgacatccaaggacatttgtgtaactcagcagagtaaatgaggacaaggaggactaaattgctatctgagatcgcctttcccatcagcaagatggtggaactggggttctcagtgtccagtttaagttgatttaaagaaacttgagaattgtaatatgtattgcatgctgcaatcatgaactatcgctcatacctgctgcacatctagcccccctcccttcctccgctgccacttttggtccagcatgaaaagacctcctagctggtctccccacatcctcttgttctccttctgcctactctgcacatggcagccacaatgacatttgtaaaatggatatctggtcatgcttctcctttgctaagaccctaggaggaccaccactgctgctcagcaacccaccccccactggctctcagccacccactccaccccatcctctttggcgccaggctccagctgtctccatcattgccagctttcactgagctctcacagtaggcctgaagctcttccacttattgtatgacctcatttagtctcaactccttgggagatatcttcacagaggcacagtgaagttaaattatttggctaggattgccaagccagggccccaaacctagtcccagcccatctcttctatcttaataaatatcatcagctgcccagcatgtcatgccagatgcccaggagccaccttccatcctcttcctccatcaccccctatatttactgcagcagcaaggcctgtggattttcattcacctgcctcccgtgcacacatttgtcccttccactgccgtctcgctggtccagtcaccaccatccctcactggaacaactccagcagcctcctcgctggatggcctgctctaatcatgccctctgtttgtttctcttcctctctcctttcctccctcctttccttctttgctctcttcctctctccttccatcctttctcctttttctttccttttttttttttttttgacagagtctcacccaggctggagtgcagtggcatgatcttggctcactgcaacctctgcctcctggcctcaagcgattctcctgcctcagcctcctgagtagctgagattacaggcatgagtcaccatgcccggctaatttttgtatttttagtagagacggggtttcaccatgttggccacactggtctcaaattcctgacctcaaatgatccacccacctctctttccttttattttattttatattttattttgctttccttttattttgaaatgtaggttttctttctattgaggtatgatggattgagcagagcaggagacacttgctattaaagagagagcttgttacgcacagttcccaagaggaggagacaccatgccatgagggggccacagggggaagagggagggaggggaaagggtggacaagagcctttatgtgatttccatgggaagaaacagacgaggcaaacatgtaggcttaggatccactagtttgtccaatttcagcagccccagcatgcagaggctgtcactagttgtctgatacctggccccggggtgattagggcaaggcctggcgtgattggtggctaaaagtgaaagaacctacgagagcccaggaaaggaagtggtcggggtgtgggctctggattgattggtttgtcgaccaaaggggaactcgcaggggagttgcttattttctctaggaactgcctgtccctgggaggggcagtccctccagggtgaagtccccagcatctcaaaacatcagaaatacagaaaataaaaaggcatggttagtattctttccttccttctttccttccttccttcctttcttccttccttcggagaatctctaaaggaaatagcataccctaaatacagttgaaacccccttcccctacaaaaatcatacatatgattacatatgcataatctctaagttagatatgatatctatgcatttctataaattttctaaaggtattttgtctctttgccttatgtgcccccttcccctacagcacttctctcattctccatcaaatgcctgaatgtttctaaactttgcatgaattatatcttgagtatatgatgtgtgtgtgtttgtgcatgtgtatgaagagaaagtttccaagatacattcaagaagagtaacaaaaggcaaaaatagacagaattcgatgtgaaagtgcctcctaaagaaacaagcagcatgaacaagaataaacctatcccctacacctcacagtcaaccgcagggcgccacggacagggagaaacacaggaaaggccatcggaagggaaacgaccaaccaccaaggggtgcccattgactgggtggagaacagacttcccaaccataagcggcgcaataatatcttcagaggccaaaataaaatgaaaagccaacttggaactctatggccaattaagcttttcggacataaaaagtttactacccacatatccttgctctaaaaaaagaaaaatctgtgacaagaaacaactcaaaatacacacatacatgaaccaaagggaaggaggggaaaggaaagacaacaattgatagactatgttttatttatcatggacagtttcagaaaaaaatctattttccctaaattacggaggatggaactaaaacagagaaaaaaggaagggtgttccctgaagggttaaagcatattagggtcttaccttaagaccctaagaaaaggaaacaaacacacgaaatacctttaacaaatttatagaactgcatatattatacctaatttggagattatacatttataatcatatatacgattaaaaatctaggagtacaaacacgctttgtcgttgctcttacaaaacctgagatcacagcaaacattgttcttcaacttaactttttcccttggtacatgttgtcatctctccagctccgtgttctggcgcttacacaccagtcctttgttgaagaacaggtgattctgttccaatttgcactactgcaaaccatgttttagagaaagtccttgtatgcatagtttacacattttagagacccagattagaaccacgttcacagcaaggtttgctcaaggaacaacgaatagctgataagcatatctgcataaaactcaagaggttctacataagattcagactgccacctgccctgggaaagctgcaatgtgctcagtagcacctcagccctggcattccccaagcaccaccagcagcgggctgacaagagctgtcttggagcaggacctgcacactctggtctgcctcaagctatttcttcactgatttctcactggccagacccagcaggcttctaagtgtgtcaatgccttgaggttgattacattcataactatttttttatttctttttaaattcttttttaagagagtcttactttgttccccaggctggagtgctcactccaacttctgcctcacaggttcaagcgattctcgtgcctgagcaactcaagtagctgggattacaggtgcaggccaccatgcccagctaatttttatatttttagtagagacagggttgcgctatattggccaggctggtctcaaactcctgacctcaggtgatctgcccacttcagcctcccaaagtgctaggattataggtgtgagccaccgtgcccgacccttttaaaacttttgtagattcacgggatacacatgcagatttgttacatggatatattgcacaagggtgaggtttgtgcttctagtgtgctttgacatcactcaaatagtgaacgttgtacccagtaggtaatttcaaccatcacccctcccacctcggcttttggagtctccagagtctattattccctttgtgtgtccatgtgtacccattgattagctcctgcagataagtgagaacatgcggtgtttggttttctgtttctgagttacttcacttgggattttatttgaatattttcaagcctagcctttggaagtcgttaccgtaaaattgtgtgctaacttccctcagtctctcgctctctcttctttgggaaggagctctccagcttcttggtctttgtgaataccctcattccagaatgacttgtgttccttcctgacccagtcactatgtcctgtggaagtagagggccctacacatttccctcaggatgaagagaactatttcacttttttgcaatcactgaacactttttcaaccttttctttgatggggagtcaaattgtttaattatttgactaggtcatgcattcacctggttaaaatttattagacaaaattattatgaaattataaaagttattcaaataactttctttcccccattctttcttccattcatctaagtcctactcccccgcagcaaataaacgcatagttattagattccggtgtatccttccatagttttttaaataatgattttctaaatttttaattactttttatttcaatagctttaggggtacaagtggtttttggtcacatggatgaattgtacagtggtgaagcctgagattttagtgaacccatcacccgagtagtgtacattgtacccaataggtagtttttatccctcacctcctcccacctttcccctcctccattataccattctgtatccctttgtgtacctatgacttggctcccacttataagtgagaacatgcagtatttggttttccattcttgagttacttcactgagaataatggcctccagttcatgtgagttgctgcaaaagacattactttgttcttttttatggctgagtagtattccatggtgtgtatgtaccacgttttctttatctactcattagtcgatgggcacttaggttgcttccatatctttctaattatgaattgggttgcaataaacatatgcatgcacgtgtattttgatataacgacttattttcctttgggtacatacccggtagtgggattgctggattaaattgtagatctactttcagttatttaagaaatctccatactgtgttccatagaggttgaactaatttacattccctccagcagtgtataagcatgtcctttttaccacatccactccaacatctattgttttttgactttttagtaatgacctttcttgcaggagtaaggtagtatttcattgaggtcttaatttgcatttccctgatgattagtgatgttgagcattttttcacgtttgttggtcatttgtacatcttcttttgaggaacgtctgataatttcatttgtccactttttgatgggattctttgcatttttcttgctgatttgtttgaagtccttgtagattctagatattaacctctcggggaatttttaatacacatacatacaaaagcaagatacaatctttcccctgtctttaattcaaatggcagcatgttctattattttcatgtttacttaaaatttacatattgaagaatttctcatgtggctacatggagggctgtctcattctttttcataaagtcctagaagattcttgcatggatgttcaaatttattcaacccaatcccactgacaaacttttaggttgcttccaggtgtttgctattacaaacattgccacagcaaataaccttgaacatactgaccaatctagacatctcatcaaccagcagaccctcctgcagaatctaaaccagcacaagctccccgtccttgtacaataaatagactccatcttctctattgatcatctgcttctccccattcaaagaaacaacaccatggaatacctagatgcttgaagtctaagcaacgtggagacctattgacttttatgttctccaatgactcctgcagattaaagaaagaaagctgattttatctctatctctccctatgcagtgttataaaatgtgggtctaggagagcttggcaaattagatgacggctttttaaaatgttggttatactttgaattattagcagcacgaatatagcgcaatatgcacataattagcaagatttctgaatttattatatatacttattcttgtttcttttaattagccagcactctacttgaaggtagtatggtgattcaaatgatggttaaatgtgtcagatggtgacaaaatgcactaacccgccagagtggaaagaagaaaagtctagaaatgccatgagatcgttttcatcctattaaatgcataaaagtttcttcatgtattggtcatgttataaccatggcacaatcaaaacatgatttattgagtattttaatacagcctgttaatgttatgcaataaagtgtattttaatatttaatgtaatcagtgaatttcaaacttttttcaggagatcttgtggttttaaactaaattaaatacagtaggtgacaaatgaggtcccaagagcatccctaaaggctgattgggcctgtttagagcaactagaattcaaaagctggttttgggccaggtgcggtggttcaggcctgtaatccagcactttgggaggccgaggcaggtggctcacctgaggtcaggagttcgagattagactgaccaacatgatgaaaccctatctctactaaaattacaaaattagccaggcatggtggctcatgccagtaatcccagctattcaggaaactgaggcaggaaaatcacttgaacttggtaggtggaggttacagtgagccaagatcatgccgttgaactccagcctgggcatctcaataaaaaataaataaataaataaagctaggtcagaagctggttttggttttggtgttgagattgctgtggagtagggggaaatgtgccattgcttgagaagtgagctgataagggaagttcatctgctcacatggaacaggcattcttgaggtcaaggtcattggttagttcctggatgaattgtatgaccatgatagtgagcagctatctttctgtagcctagcatgcattctttgttctcctgataatagtgtacccatttcctatgaggtaattaatgcctccattggatagagcttagtgagagtacaggtgtactgctctcctccaggtgtgagcattcaacccacaccaagtaaggagagttctcctctatcagtctggtttggtttggtaatgctgcataaccagcaaccccaaattctcagtgtcttagtgtaaagaaggtttctttctttcttgagcccatcccaagtcaaaagaggggctttgataattgtagtttctcaacccaggttgattcaggctgcatttcagtccatgctttcatgaagaggaaggcaataaaaagaaaattttgcagggtcttgtccctcagcatattgctccaggctgtcacatgtcacctttgctctaaatacattggccagaggcaacacatacagccccatccaaccacaaagagtcaataagttcatagtcactcaaggggacagaagaggacaatctggacgaaggcactgatgtcccattgacacatttcctttctgtattttgaattgtcagcagaatggtcttccaaaagaatacctctctttggaatccatttatgccatgggaaatacttggacctcctccagagcatcctttgctattgaaactctctaatcccgcctttcccaacaaaccctcacatccttccatgtccttccagtgggtccccttgcacctccatgagtaagcaagatccagcctccagttctcacaatcaaagagcccaagacactcagctgcactgccctgtgacatcagccaggcactttgtcaacatggctcagtttagtgcttccctgaattctgcaaccctaaggctggtgccacagtcacacaagagctgcatccacagaactaactgagaaacggagccccagagacggcagggtttgcccatgggacagggattaggatctgtccaaatcccccataaacctcccgcaaggcagagggaatatcagcagggagggtgaggtccctgcacagaacctgccatggaaatggaagaatacttgagccaaaagagacctcagagaggatcttgcctaatccttgcctggtggatgaagaggggaagacacttgcccaagaccacatgattgcttacttgcagaatccctaactcacacctaggtggacgtatctaagaggaaagtaaaaaacaaggaaggtgcacatctgagcatacctgggttgctaagactcaggctggggaccacaacagcccctttcactccactctggcttgagctggtcctactttaccccttcctttccccaggaaagaacctgcaggcagccaagaagctcagcctctgtctgaatctcccagggaccagctgctttctgtagaagcccataggaatagtttagaaaattgccaactattatccatcagctctaggaatgggaggtcaatgggaggtataacttggcagttaaacctccatttaagtcaaagtttacaacttagtcccaaggcacaagaagaatcttctccctcaaggactaaagcttgaatatcaaccaaaaaaaattttaggttacaggatggaaaactaattcacatatacacctgtgcacaaatttctacacatcaatcaacaaaagcaatgcattagtcctgaataatcacaaataattaaaaatatatatttttctctgcatctcctgaggctaaagcagtgaggatcttctactgcaaaattatcactcatattaacccttatgactgcttttgaaagcataaatcccatttcaggcccctccacaggagggcaagcttcacatagaccatgacatctttttggtttgcctacaaatggacacaattttgcaaagatttatttttattgtttgaattaagaaaacactgggttttcttccatttaagaaacatagaattttgttataatgttaaatatgcttttaaaaacttattcttcgaggatttctgtgcctctcaatttcagaaaaaagaaaaattcccgaatgtgtttggtggtaaaccaacttccaaacggtgaagtaaaatagcctgaaattaggaaagttaaaaacgtaaagttttaagttaaaaaaagtaataaagactccattgagaaagtgaaacgaaaatatttgcaaatcatgtatctaataggggactcatgtccagaatatataaagaattcctgcaactcaataatattaataaaaacacaaacagtccatttaaaaatgggaaaaatatttgaatagatatttcttcaaagaagtttaaatggccataataaacacaaaaaagatgctctatataattcatcatcagggaaataaaagacaaaaccacaatgagaatccattttgcacccaccaggatggctaaaattaaaaagacagatcatagcaagtgttggtgaggatgtgaagaagatagaaccctcatacactgccagtaggaatgaaaaatggtacagccactttggaaaacagaagaccctcagaaagttaaacattgatttaactttaaataaacatagagttcttcaaaaagggcgttgatgtgacttagcatttccactctgaggtatatacccaagagaattaacaacatgcatccacaaaaaacatgtatgtgaatagtcacagcagcgtcattcataatcaccaaaaagtggcaagaactcaaatgcccttcaactgatgaatggatgaacaaactatggtacattcgtgtgatggattcagccatagaaaggaacaaagcacgaatatgtattacaacataaacgaacttcaaaaacattaagctaagtgaaagaaggaagatgcaataggccacatagtttatgatgcaatttataggaaatgtccagaataggcaaatccgtagagacagaaagcagatgagttagggagaacagaatgattgctagtggatatggggtttctttagggaatgattaaatgttctggaattaaatagtggcaataatggtgcaaccttggaattatactaaaacccatgaactgtacactctgtaagagttaattttgtggtacatgaattattactcaacaaatctgcaatttacaaaaaaataattaccttcaaaacaagatgaagaagaaaaaggagaataaggaaagaagaagagaggagagaagaaggaagaagaaaaagaagagaaaaggaagcagaaacaatgctcctgttggtttgcatttcagagggaggtgctgatgccagcatgttccagcaggtcttgcagagctgtagcctgaggcttcctgcccacaccccacaaaagtcagcttcctgtgtagaaggagggtcaagagctgcccactgggtctcctcatggttttgcaatgctggctgacaagcgctcctctgaccacccactccaggcaggaccactccactaggggacactcctgctcctcgagaagagacccagtggccaccaggacagtgcagtaactctccagcccctctctatgccccgcgcagatcaacgggctttcttccaggggagtttgcccatctcctctcctcccttttatttgtaaaaattgcacctcctccgggaagccttattacccctatctaacttatattaactctaaaattccatgttttccaacgtgcacttctttaagtattcctcagaaaaggcgaccccgtgtaggattgcaagataaaacgtagatgtccaggaaaatctgatttttcagatagacaactgtgagtatgagtatttttatttcctcgaggacttagagacattagatacccctgcagggtgcactgcaaattcctggggagggttgtggcctgcagcattctctcgatttactgaaccacaaaactagaattgctggattaggcaaataaaaacacaaataacattttgagtttcaggtaaatgatattttatgtaagtacaccgcaaatattgcatggatatacttgtacttcaagattatggtttatctgaaatggaaatttcactgggtgtcttgagttttaactggcagccctactgaggtggcttattcatcatatagactctgggcatcattttcataagtgtgcggtagaagctcaggaaactgaatttgtgagaaaggcctcaaataggcaggtatgatttgtctaagggtcatgaaatgggagagcagtgtgtgtgtgtgtgtgtgtgtgtgtgtgcacacgtgcacatgtgcgtgaattggggccgggagcgggtggtgtttgggttaaaaggcttcccagaaatcccgaactctgatccatatcttccggctactttaaaatgactgaaacctcaggttcctttttcagtgctttattccacacaaactcatcttttaggaggctatttgacagtgcttaactgcgacccacattgtacatgctcataacaaagacaagtccccatctaccatgctgtaacttagaaaggcacaagttatacaacatctggaatctacccaagggaaaaaaaatgccagtctacaaatctagcatgctggaggcagaaaccatgtgctcagaatcattaaaatcacatttcactttgccacagtgcagctctgtccctggctgatggccagataagcttgctggcagagatctgctcttgtggtgctgagcgaaaggtccacacacctctcggttaatacctgcccaggcttaatacctaatcaccatcctcggattgcctctcaacactcattaccagcactcagcagttgcagccaaggtgatgggatttaagattaggacaaaagagtagtcacttttgttctcaagtgcaggtctcctcagaacatcatcgttcagcaaattcgggagacagcatttccactttctactgaagcatcctgtaagaatcagaaaagcatgacaccgttaaagataaacaaaatggccctatttgagcaagaggggctcatgctgtttggtctttgttttacgcccatgatgagtttaactgtttgttcatctccagcaccccagcctgaaactcaccccttgacaagcaccctgcaagctacagtgattctgaatcccagaagtgatgggctgtcttggagaatcccaggggctgtcctgtgctccaggcctgtctcaggactccttgggtggacgcaatctcctctagtcccctctaaagacttcttcatcattacgatggtgagtgtgggcaaaccaggtgggatagtttcccctgtcggcctaccagattagttgcttcccaggaggcaggtagaaagggaaggagggaggagagtgggaggagccaaggagaaaggaaagagagggaggacaagaagaaagcaagagagagagctcttagggaaagcagggaaacagtgacgaagggaagaccagctgtaccatattaggtaagtgatcatttaaagtcattatcaacttactgtgaatttcagatggagtttctggaagctacagtcttatttcctgttaggaattcattcatgtaacaaatgttctatgggccgggacactgtgcttggggatgcagatacacccctgaatgtagccatttgcattttaataaggcaaagcaaacaatggacaagtacactcacagataagacaatttcagacaatggtcatgctggaaggaaatggcatggtcatgggatagagagccagaagcaggaggagatgttagacagggagcaatggacagggaggagatttagaaggggcctcaaggagagagcgcagtgagagaaggagccccctgtgtgtggacctgggaaccaactggcttggcgggtggtgccatgccacagaggtcaacgtggctggagtgctgagcaaggggacaagttgcagggcaggagtctaagggcatgcagactggcaggtgctgataaggagttggattgcattaattcaggactgtaggaaaaatgcctctgtgatcagacaaatggtcaacgtctcttgacaggaaaacattggctgtgacgtgggttgtgcaatgaagcttccaacccaggatctgtttctgaatggctgtcatggagcagagagcagaggctctgcatggccccaacacttgtccctcctccaagctccgacattaagaaacatgcctgcttcctcgtggaggagggaagcctggtctaaggtgtgtgctacaggagaggaaattcacaccttcagttgcctaggtgacagcttccaaagtatgttgcgggtctaactggcagcctggcaaggcctctgagatgggaaaaagggagcccctttccattggagtcaccatgattggaccaaattctggtcctcagctcaggggcccttgtttctggtgaaatctttcagctatatgccaccagaccccaaatatgtgtctctcccagggctaaccctggaggctgaaagaaaccagaatactcacccagcacggtgactcatgcctgtcatcccagcactttgggaggctgagggaggaggatcacttgagcccaaaagttggaggccagcctgggcaacatagcaagaccccatctctccaaaatttttgaaaatggctgggcatggtagcatgtagctgtagtcccagctacttgagagggtgagacaagaggatcacttgcctctcaacccgggaggttgaggctgtagggaactattattgcatcactgcactctagcctgggcaaccctgtctctaaaacaataacaacaacaacaacaaaacaaaaaacaaccaaaacactattgtctagtgtccaggacactagggcccaggatgtggcacagagcatgagagccatctgcagcagcacctgtgcccagctgctcatgggaagccatgtggggtaggaggctgacggacagcccagggcagggccaaggcactgaaacctcatacattctagtcagtcccaaacgagcaagaaccttcagcccaggtgagtttgtgtctcggtggatatacagtgtctctacccatgagcagtacttaaatgcctgcacatccatgtcacccacttcatcttctatcagtcactacaagcaccatctcctccaagaaaatatgttctgatggaggaaacactggatgtggagtcagtggcctgggactgcctagaagcttcactgagtactggctgtgtaacctcagacaaaccactcaccccctctgagtctcattttccccacttatacattgagtctagcaatgcacacctcccaggactgggtataaggattagagtcgacgaatgcagggtacgcagtggctgatatttgctaaggaactgcgatgttctgattcaatgtggtggccagatctggagatcctgagaccatctagtcatggttgctctagggtgtgagagatgaaattcagggaaggtagaggaaggttcccagatgtgacagcttctgcagggagtgggattgccatgggaatctccagagactggacaaagaggagcttcactgttttaaaggcatcagatggacagatgcagagccactttcctggtaggatttatgactccagcaggcccccggctccaacagacagctcattctggaggaaattaggtgtcaaatgcagtgttctggaattcttagggcacccattggcagagttttacagccattctggctctaggccttcgtcaacttgtcaaaacattgactttcctctgcagctcctaaccaggcaagcaccaggcaatagcaatgagtaatgcagctcttaacacctcagtctgaaaagatgagacacctcagaccctggttcttctggagtttggggcagttatatgacactgaagtcatttgctccttgtcacacggggaggactttctggcttttcaggctggcaaaagactttccccaggtgagtagagctttctggagttgagacatctaacatcacatcccagatgagaaagagcagatccatcccactggccacttgcccccacaaaaatgggggtaaggaaggcagaggattgtcagcaaagctctgaagagcggctctgcaccaacaggcagccggcaggccccagcctggtcccacgacttgtcactgaagatactaaacccgcagccgctgaattcctgtcctagttagggtgtctcttaaagcagaccctgaacaatgacttgggtgcaagtagttgatttgagaggtgacctcagggaacaggagcaacggagcaggaggaagccagtgacagggtgcagccctgtgggaaatgggggcccaatctgcagggccaacgcagtgttgtgaaattcttcgagcagtctctggagagcaggggagcatggagctcagaactgcccctctgaaggactagagattgggcgtggatccccacagcatcccctgctggtagagggttcatccttgagtgtgttaacccttctgctcttccagactgtgcctctgcatggctgattagactcccacagctcaaagaaagctccgaatcaaaaaagcagaggttgcaggctgcctgccagaagtgagaccctggtgatgggcctggcactgctcactgcagtgctgatgtcaggagggcccaggatgtggcacagagcatgagagccatctgcagcagcacctgtgcccagcagtgtgctaagcaccaaatgagagcagaagtcattgtgaaaaacagtgcccagcctcaatgactcctaggaaagtttggaatagacaagtgacccccggggccccagcccagaagcctaagttagaattgagtaacaagaagaaaagatgctgttatttaaaacaaaatttgactgcagtggctgcagcactctcaggcagaggccaagttcttcgtaggggtaggtggcctttttgtttagaaacatacttcagaggatctctttgtgtgtgtgaaaatataggccccagggcacagtgggaaggagaaaggcagagcgctctgctctgtagtgattggagtttttgtcttgtttgtttggagggggcttgtgatgcgaagaagaaaattgacggagcttgggacacaaaggtcaactggcaggagtggattggaccttggaaggaaggcagtcaggagttactccctgtagagggatggtcagggggccacaaggcaaggattgctcacaaaacagccacatcaagtcggtgcattctgtgatatgctgatattaactatctggtgtccctgacccttcggtatgaaacatcttagcctctcattagttatgctttgggaaacaaagaaagaggaacattgggggtgaattaagatagagagaagagagcagccatggaaagagagtgggggacaagaactcagcagggcagatgcaggtaggtgagctccaaaactgggtctcagcccaggaggactcttggcttcacccaggaaagcattcaagggtgagctggtggtatcagacacgttttatggaagctgcagtgcacagcagcagtagaaggactgctccttgcagagcagggataccccacaggcagtgggcccagagtagcagttcagaggcagtgctgcactcatatttatacccacttttaatgacatgcaaattaaggggagggttatgcagaaatttctaagaaaagggtggtaactcccaggtgttgccatggcaatggtaactgacatggtacactggtgggtgtgtcttacgggaagctgcttctgccttgtacctgttttagctagtccgcaatttggtccggtgtctgagccctgcctccaaagtcaagtcccgcctcctatctcagggctgagtatccagggatatgtgctcccttaggaatcctcggagaagttgagaagacactagacatctcacagcatgcagagtaggggcttgagtctgcatatttgaagttggaggaaagtgtggcccccttaagcctgaagaacacaggactctgggctgtaattcagatctatttggtacccagttatcactaccaaaaacgcagctcagccgggtcccatgccagagagggaagcccagggatgacaaatgtggcccctgccctcggattatgccaatgtcctagggcgttccagttgtcagcaaccaacctggctaagcaatgcctgagatggcctggtgggaggctccataagctgaccagagacatcctggaagacccccaggagaagggacatcagaacatcagcttgaatgatgagaaaaaaatagcaataggtagaaagcgagagagaagaaactgtgggcaaagaaaagagaagagtttctggagggagagaccctcatggggtcttccctaggccaccaggaacacacaggtgtcaccttctgtatctgtcaggggtcttggggaaactgaggcacactcagagtcattgagaagagtttagtgaagggactgctcacatgggatagagaggactagagggatgcagtaaacccaaggccacggctgtgcacatcactactgcctgacccacaggggacagtgccactgtggaagaggccacaggaaggagctggggatttcagagaggagcccaacccctgccacttttagcctagcagggagggagcagggcagatgaatatcccgatctctttcttccatccaaccagtcccgcccccattgactaaccgagctggaaacagaggtcacgggagcctggtcagtgcagccctgcagacctagacccacctagcgtgggtgtggagaggcttccggagagcatcctgtgtacttgctgacaaatcagccacctgtcccttgcaagctgtccagcatgagctggcctcatgcgctgaagctcagccctgcttttagagaggtgatcagcagagtcgtagattcaggaaaaacgtgtgggctgcggcatgccaccgtaccctccctttgcctgatacctacaggagtctgtgttactcaggaggactcaggaatctggagattgtgctcttagatggaaaattggaactaggaggagaaagtaagtgtgatgtgcacagatcccaggtggcctcgcattttagaagtaaatggcaatattttcaaatcaactggacgtaatattggaagccagcagagcaactctccagctaggagtctatgcttgaggacctggcattgtcagcaacctggggggccacactgcacccacacgagcacaaggcttaccttcggtcagggtctcccagacgttgcccctggggtggtgatttgtgggcaggtgatttatcaagacaggagaacccagtagggaaaagagggcaggagaggggaagaagccctgcaagatgctatttcaggtaggtctccagcctcagccagaccccattgagggggggcggggtctggaatatcagctgcatctcacagtctgcccagctttgagtcagaggaactggtttttcacacccccacaggatgaagggcaagctgccaggcacccgaggctccttcatgcttgcagctcaagcctccaggggccaaagagaagtcctcaggaggctgttggtgcagtccacttagagcaaagcacatggccgctggaggatgggggcacagagctggcaagagtgatccacatgaacctggacaggaccttaacagtgtctgctgaggcccttgccccagctggccctgaagtcgaagtctggtttgctctgttttgttggtctgtgcagtggagaggaaggtgccaccccagctctagttctccacgtcacttaagaggtatgggatttcagcaaggactgaacaatgctgggcctcagctttctccttcatcctgtgaagaccttcaatcttatctaccttgggggatgatactgtggttatcaaatgtcagaggaccttgaaggatggaaaacacgtgtatgtgactcatcaggctgtgccattgcaaggtgatgctgatgtcaggatatttttgtctgcaggagaatccactactgtatggagcttgtcctggaaagccattgcaccccaccccaccacccccaccatctctcagaagaggtcacaaagagcattttgttacaacataaccttactcaagaaatcactcaaaaaatgcacataggaaccactgaaacatttcctgaatttaaaagaatgactcagcagagcattcgtttgtgatagaactgcttcttgaatttctcaaaactggtgatgttcacaaaggccaaaatgtgtgagcattctgccaaaaccaggccaaagtttgctgctgtgctttgtatttaaaaagaataagaaaatgtatagttcaaaaaataaaattctaagcccaccaactgactaaacagatcccctcttggccaaggggaccccagagtaatcaggaacattgagttctcggccatgatgggatggggagcatcagacaagtctcgttattcccttcccttgctaaccaccactaggctttctttcctaagggctaaacacaaacctacccttccaacacagtccactgctgtgatcaacccactgcttgacgctgctcctcgtttttgcctgataagagaccactgaccatggggtggctctgcctagtccacggaggatgcacagtgagggttttggtgtcctctgctttaccttttgacatcagagggccaaaagttctacccttgggtcatgctaaaaccaccatttttggtacagggggcccatgaaggggcatgcagctcacttgtgcatgtgcatgtttcacctctcataaatattcatgactcctcctgcagcttattgaatatgtatattcagccatccaactcagcacaaattcctgttccctttgcccctccctgaaagtgtctgtttctggcttctcatcagaggctacgcttcccagccggtcagagtggccaccctgcagggtgcaaccctttatgaaaaacaaagttcttctttccaaaaggaaaaaataaagaaagaaaatttgtagtttaacaaagacaattagataaagttaacccactggagatccccgtcctgcaggccttggtgctgattgatctcctgcccaggacatggccacacgggggctagtgggttggtgacctgaggagcactcctgagtgacctcggagttcagggctgcctccaagaatggctggtgcataaagactactcagaccaaagctgagcactccaaagtatgaataatgaaggacatttgctggctcagtggtgagaacctggggtgtttaggctgtcactgccaatagtccactattggctgggatcagaagagcagaaggccaccattttactgatgggaccaagtgaatcccagggtctggtgcaacctggagtggaaggtgcagagatgggcagcaggtccccccgatgcaacccttctgcatgttgacaacaatataaaaagggaatacctgcatttctattttgctcttcagattggagacctggttgtattacactgcagatttactctagccagtcctcagatattgcctactacttaaagtgaattgttaccaaaatgttcagagaaaaccttagattaagcgtattgactatgtttcttctttaagtcatagttaagggcaataacaacaacagagcagctgagtagatattttctgctcatcattaataataacccttcggctgatggatggatggccctcccggtgatgaagagctggcagcactcactctgtggcgggatctgttcctgggagggcctgtaagatatttgatttgagagatgcctggctgctgatggattaggagggcctggtagaaacacagtggcatgaacaccaggaccataaaaagagaagaagagtacaattatcttgtatgttcccttccttctctcactcccggtagaaccagagaagggcaagccgagaagcatggaggtcattccaccagcctgtggactcctggcccatccagtcactaaagctatggaggagaaggcagagagacatggacctgggggaaagaggaggctccctgtacctatcagctgtagggaagaagactctgctccacacagtcacttgggattgaagctgatggaggctccaccatctcatagctacttcatctggaaccagcagcctcctcagcagaaggagggagcaggaagggtgtccagggtgttttcactcgatcaacccggaatgagaggtagcactttgctcacatttcactggccagaattaggaatgtgacctcatctaactgcaagggaactgggaagcaatgtgcccagaacgagtggtctgcacacattgccctgcttccttacctttcattcaatcttcaattgcccagtctaggctgttccccaccacttataccagcacagcctcctgtttccaaacccagtggtcattctcatgtttcccaatctatgggcagcactaaccccagctactgcccccacctcgatctagcctggcctcagcttctgcaatacctcattctgctgggcttccttccctctctctctgctctgtgagtttctcctcacccaaccttctctaaatgttggtgtcttctcagaacagatcttggccctattgttttttctctgtatattctcttgctaaataattacatcagttccatagctttaaatggcatctatttgccaatacatcttaaacacagatcgcagggcagagttctatccctaggagactcacacttttcttctccactgcttgcttgagagcccacagtgcatcatataaggaacttgagtctcccacacttgagtcaatcacggcttcttgtcgtaattggaaatctaggagtggcacatccttgacagctcccttttgctcagccctgaatataaaccatccatatgtcctgtagatttaacctccaaaatacatcaaaggaggtctggaatcaacaaacctcaggctgtctccactgccactcgctcagtgccaatcttgtcctgggcggcactcggggttcccccactcgctccttgtcaagtcattctcccagcagcaccagatttgtctataaaatgcaaaccaaatcatggtacttcctgcttcagtccctgagctggcttctcactcctcgggaatcaagttcaagttcccctccatggcccacatgaccatgcaacccaggccctcctcggcctcatacatgctaccctcccctccacagtgtgttccagccacacagagctccttgtcctgctctgcaccacttgccccctttccacaccgaggccttgtcacactcagtgctgtatcgttcactaaaacgtcaccgccttgatgagctggatgcacagaggcattgaggagaagtgcatctggcatctccccaaaacaaaagacatcactgtatcaaaagaatacctgccctcatatgttcttcccagcaccattcacaatagcaaaggcatgaaatcagcccgggtgtccaccaaccgaagacgggacgaagaaaatgtagtgcatatgcaccaaggaatactacttggccataaagatgaatgaaatcatgtcttctgcagcaataaggatggaactggaggccattctcctacgtgaaataactcagacacaaaaagataaataccacacgttctcacttaacagtgggagctaaataatgtgtacacatggatgtagagtgtggaatgatagactctggagacacccaagggtggggaggatggagggggtgaggcaggagaagttacttcatgggtaccacatacgttagtccagcaatggctacactaaaggctcagatgacaccactacgtattatatccatgtaacaaaattacacttgtgcctcataaatgtatacaagtttgaataaaggacaactgtgagtgtcttctgcacagtttgcaaagcacacgttcccagcagcatctaccttcctacccagataggatctcatcacatggaggtcccatagccatcctcttgcacccaagggtggtgcagtggaccagtggccccttggcagcctttctgacatgaaaagagggtctcagctgccctcctgtgatccatctgccaagtcacacaatgtcccgtggccctgattcctcctaggatgtgcctgccctatgttaggtcctgaacacgtgttcttgtttcttggtttgtctcaggacagcaaggacacttggctgaggaagcctgaatttgaaaattagggttaaaaacaaatttcaccttttgctcagcattcttctcttatggacccaaggaaaacctctgtgttggttaaacactctgtttgtcagcagtgagaaaacctttggcatttagggtgtattttgagtgtataaatcatgtgtttacagtgaaagatgcctgtagcagttcccgagacatcctgggttcctccctgcacctgcagaagtgcagcagaggcccctgtggtcacagaaacacacccacctcctgccagcccacctgcacacctaatgccagttcccagtgtcagaggagggcttttcagaaactcagacctggacaggtcatcaggggctagagagccattcccaggccctcaggccagctggcgtgcccaggagtcagtccccaggggcagctcatctccagagctagaaaaggtactgtcagcaggccacctcttctcagagctgagcacagattactcctatttttcctcctgcacacggagaagcagagaatgccagaccagccggatcccgagtgcagggcactgggggcagagcatcgcgggggtccagcctcgggggtgtcagtgcctgccagcacccagctcctatctttccattcttggaaacagtggatggtttccctttgggaccctgctctgccccatcctcaggccctgtggtttgggtgtcttgccccatgccccacccctactcccttcccacggccagacgcacgcgccatgacaggccattgcagcaactcagcccacagccaggagcatgcaggaggcaggcactcttgcttgagtgggcagaggctgctctgggagggaatgggaagtggaaacactgtcggagtctgtccaggagggagctgttggtgctccccatgcagaggaaaggaagaggtcttggctctttcttctctctgtcagcatggagagccaacagagagaagaaagagccaagagatggggagagccaagccctgacaccagtcttggtgtcccaggagccagcagtacctggcagtagcatctctgtgacatgtgccaacaccttcctcccttgtgctggcctcacgctgaggcagacagtttgccgggagattccaggtgtgaggcattgggcttggctttaagaaaattgctcagagagtgaggcctagggaaggcgggcaggagctggggcccaggccacaggcatgtgtccaaagcctccactccttggcgggggctggggtgtaacaggctgctcagtccaccccatcctctggcctttaaaccataggcacagactacagcagcaagtctttcagccgctgagccccccagcaagtggcacaggcagggttgtccctccatcctctagcacaatctccctcctctccccgcagccctaaatgcatgttctttcctccacccctctgcttacactggacccttagcctgatgtgctcttcattccctttccaccccttccccagaatctgccatccctccagacctggctggagtgcctcctcctccaagaagccttccctgactagcacagctcatgatttgaggcactgggtcactgcaatcatcacccaaaagtgcacagtccacaccgggttagattctgtcctaagcaactttaggctggctgccctctcaccagagccagtgacctcagctagcagccagcaacagagagattatttaacgttttcaggaggaaccattctggccattcagggagaagtcttcaagaagacctaggaccattcccaggacctttcccataagatatatactaacatggacagaatgccatgtgctagaggcaagcagagtgagtgaggcaaggaagagaggagagacctcaggctccagggccaggcaggcctgagtttgaatcctggctctgccgccggctgcctgtgtggcctggtctagtcgcttgaaatctctgagcccagtttctcatctgtggaatgaggatgattgtgactctatcataggcttaagtgagaagccatggcttgaacagggtggatgctgcgtaaatactccctgtcgattcctgggggacagtagagcaccgtggttgaaagaataacctaagcatctctgaatctgctccatgcacctctcagttttttacactgtgatcccatttaatcctcactgcaaccttataaagtagcaatgcatataatccccagtgtacagttgaggaacccgaggtttagggtcatacccaaattcaaactcctgaagatggcagagccgttttcaacccttagcctacccgtcctctacttggtggcccagcatggtcacagggccaccctgcagtggtgtggtgcctaagagctcaggaaagagtcagactgctagatccctagctcagctgtgacacttgctattcgaatccccatctctctgtgcctcagaggtcttcattctctatctgtaaactgaagataaatacactatgttttgttgaattcaacatgccatcacttgtcaaatgtgatatcattttaaatgccactaaaacagaaaaaatgcccaacataacgtatttaatagaagttctccacataaagccaggacacaaaggccgaggcccctgtgtatcagtaaatgagaaatataaacccaccatgtaaacaaagtgacaaggaaattggcatgtctcaacctaggcgccaagtgaagggagaaaatattcttctttgacctgagtaccagtttgatcccagaactggtactcaggcagatttgatgtctgagttcacacggaccagtgtagtccgaaaaacccaaagtagacaatttcactttgacctcatgttggtagtagctctgtgaaacagaagaaataaacacaaatccattctcttgaaattagatctcagttcaggcccacagcgaggctaagatgctaaggactgtaaaacccacgccagtaatttcagaaatttgcaaagatggaaaaaacgtgttgtatgatcattgagatatggtagcatctagctatgagctactgtaaccaaatactcccaagtctcagcagattcacacaaccaacattcatctctttctcaagtaaagtccgagtccctgaatagtggatgagtcagagaactgggctctgtccatcctgtggccccacaattttcagcacacaacttccatggtctccaaggaagggaaaggtgtaggattgtgtctgggaggtttccacaggccaggcatgggtgtgaaatctgtgacttttacccacaatgggttgggtagaacacagtcatatggtcatgcctgggggtgctgggagctgtgggctacacctgtgcctgggaggaagcagaaagaatcttggtggacaggcagacaaccccggccacaacaccccatgggaccagagtgaaactcttggaaaataattgttagcagcagtagattaaaatggggcctgacaccacacagagactcagtcaatgagtgctccagctatgattaataatgagaacatctttcatttgtcaaagcgatgtatttttgaggatggtgctcacttaacaaaagcagcttctcctggtgtttcctagtgacttcccatagtggatttcaaatagggatttgaatttcaaaaaaggtaatctgtgtgcaggagggcctgggtggtaggaggctaatattcgcgttcacaaatattgcattcttttaaaccagtcatcctcacattcagtttccacaggaaagcttaaaagtgtgagttctagaattagtcggcctggctttgaaccacagctctgtggtttactagctccatgacctcgagctaagcccttggcttctcactaagctttggtttctgcagcgtgaactagtaatgaaacaactgcctcagaggctgttgtgagagtgaacacagataatgaaggtaaagcgcacagcacagagagggcacacaggggctctcagcgcgtggggtcattgtttttcttgtaatttttattaatgccctggaagccatttttcctaaacctcatgttagcaaccttgggtttgagccatgtaaagtcctgtgcgctcccctatgccatctcaggtttcagaaactctaccttctgtgcggactgattgtctgagcaaatgctagatgctgggtacatatgaagctctcatgtggacagccttaccaactggtggtctgaacatttatttccaattttaacaaccctattaatagttttatcctgcgaaacaactcaaagcattatagaaactctagtgtaaaacctcacatcactcccagttcccaccgtcggctgagcggaggcgtcggtcacatccatccggtttcttttcttaatgtctagccaaggcccacagagatgagcaaatgcctccgatttataaccaaatgtaaagggcagctctgtcctctctgcaatgcaaaaccaacagctcaatagttggacaaccacacctttccaatagtgtcaagaacgacttctgaactctgaaaattcagtgtttggtttatgactccttaaaatgttttacccatagctcctgggacaggagccagaaactctgcccctgtagaacccagcagagaagaagagctgagggctggtagctgactcacagccagctttctgatgtgcatggtcagggaggaggtgctagggtctcagccttcccttgccccacacttcagctgagaacctctgaagaggcgaggtgatgtcaggaactcagcagcacgcccttgctcctccattccagatgtaagtcaactcagtccctctgcaggcagcaagcattggctttctgtcaatatccattcatccaaagtgtcccccaaaaccaccctcttacccctaatctcagtgccttgttgaggatggggctgatcccacccctagttctagatctaggctcaaaccaccatcaactcccacctctgcgagggctggttaagggatggactcgggacacatcagagacaagccatgctaaccccaggacctcgctggagcagccgggagagagaggaccttgctttgtcctcctggacagaagcgggctgtgtctaccacactcacctctgttctctatccagggcagaaactgagaatggctcccacacacaggaaaggaaatccagaggtggaggaagggagaaaaggagagacaaggagagggaaataaacctggtccagatgacaattgagcctcttatacagatgagcctgaggccagatagactttgcagtttagggacctgatatattcccttggaggcactggttaagttttctatcctgtagccaggaaggagtcttgtgtgatgcccccatagactgtttgcttattgcaatggctttgcgccttcagctgtcctgaacccaaacctacccaaactcctacccatctctattcacaccacccaaaccagctatgttgtgagcctggcattgtgcaaagtctggaggatgcagagctcccatccctccactttaagagatgtcagtacagcagtgcagtgcaggaaaggcagagctagagctgcgcacaggggtccaagaaggcttcctagaggaggtgacactgatttccactgaaggacacatgggagtttgggaggtgggagtgaggagagtcatgggccagaggcacatagaggacacacagcccacagaggacccctttcctcactcctatggaccctcgtgcctggtttcctccttgttttctgaagtcaacctggtctccccagatattttcttcaagtttcctaaagttagctgcagtgtggtatatttcagagacaggaaaggtggccacgtgcacaagtggcatccaagctccagcctctcccaaactccatgggtgccaggtctgagagctgggagttcaggccccatgagggactatgcctctcctgcctgcatcatggttctcttcctttttgctaatttcagaaatccacaacataatggaataaacatctatgtgcccggcatccatgattagcaaatgaaaatacgttcttaattgtgccgaaattcatttttcataaaagaaacagaatttcacagatttaattgaaatgcctctccccacaaacattcttatattttcataaatattttaattttcttttggtgaagagatatatctagtcccaactttatacagactgatggatagataggtagattgaaatgactgatgataaagatagatagattgattgaattactgatgataaagatagaatagacagaaagatgatagatagataaaaatagatagattagatagaataaacagacagaaagtgatagataaaaaatacataaatatatatagatggataatagataaatagaaaggacagataaacagaaagatgatagataaaaagatagatgcatagatagatgatagataaatagatagataaatagacaatagataaatagaaaggatagataaacagaaagatgataattagataaaagataggtggatggatagatgggtgatagatagaaaggataaacaggcagaaagatgatagataaaaaagatagatgatagatgatagataaatagaaaggatagataaacggacagaaagatgatagataaaaagatagataaatagatagatagaaaggataaacaggcagaaagatgatagttagataaaaagatatagatagatacagacagaaagaaagattagattgatgaaaagataatagaaagattgatagataaacagaaagacagatgatagataaggtgaatagaaagagataggacagatacacagatagagagatagattagtcatagatatagatatacaacagacacattgctttgtgagttgtaatttacataaatgccatcacagcttatttctcaacttgcttcttccatcagcattaatttttcgagatagatccatgttgccataactgctgcgtagtagtccaatacctgactatattggaatttatgagtccagtctcatgctcagggctatttggtcgtttcttattcttcataccactaacaacgctgctggcaatgcccttgtgcacatctctgagaaatgctctggggcacgtgataaaaacacaggtctgggtcacagaccatgcacatctttgattttatctcatgttgccataaggagagcagtgaccatgctcattcactctcctgccagctgagcgtgagttttccagctgcttcacttcccaacactcaggataaaccatctgactttctgagttttgtcagttgggtacctgtgaagcaggttagcacctttgtttgactttataagcatttttcatttatttttgttcattgatggtctctcttctctgaaactcctggtcttcaccttttctccatttggtttatttgtcctttgccaagaaaattcacatgtaggacttcttgacatgttctgggcaccgcttcctcacctgtcttcttccactctggccttatttgttaacttggtttatgatgtctcttgcaaggtagatcgtgtgtgtgtgtgtgtgtgtgtgtgtgtgtgtgtgtgtgtgtgtgtgcttgtatgcatgtagtagtcatcacagaaccatcttttcctttatgagctgtgttttgtgccttgtctaagaagtctttctctaccccaagatgataaagacgtgattatcaatgaccttttcaaggttataaagttctgcttttcagatttagatcttgtatccatgtggaaatttgtttctttacaggatgaggttagcaactgattttaattttcttcccataggaaaactaatatttgagtctcctagtgtgtactaccatctccatccatcaccaagttcccataaatgtgtgggtctacgtgtaggccagtgcttagcagacatttttgttaaaagtcaaatagtaaaattttgggctttgccagccacatagtctcaatcacaaagactcaactctgctggtgcaggggcaagcagctcataagggaatgaggacagccatctcatctgttctgctaatatatttatcttcaaggcaatgccaaacttttaacacttattatgacttcctaatatggcttgatatctgatagaggaaataccaaccctttctcttccttttttagaattatcataactaatcttggccttaagtcttccacgtaaattttagaatgattctgacaaattccacaattttattttttttgagacagagcctcgctgttttgcccaggctggagtgcagtggcacgatctcagctcactgcaacctccacctcctgggttcaagcaattcttgtgcctcagcctcctgagtagctgggattacagatgcacaccaccacacccagctaatttgggtatttttagtagagacggggtttcaccatgttggccaggctggtctcaaactcctgaactcaggtgatccacccacctcagcctcccaaagtgctgggattacaggcatgagccgccatgcccggcaattccacagaattttgtattgggtttttaaaatggaattgcattgaatttttaggttaattgggagtggggggaacacataattataatatgtgttcacatcatcaacatgtttgtttggtttatcctaaggacacatacacagggcccctctacctggtgtctgattcacatggtgacaccacctttcccatcacctataccagaaagctgccagtttcatccccaccttccctcttcttcctcctacgcagccaggtacagcattgcctttcccctctttctggggtctcctctgtctctctcatcattgctggcctcaggggtctccctccctccaatcttcttcctcccatttcatctccatggcgcaccaaagagccctctcttgtcacccacgtaccatttggctgaagcagagctcaatatccttagcacaacttgccagaccttgtttggctcctaacctacttctacccctcaccacctgacccgctgccccctcaaggcacctgacgccccagctgcacagacactggcagctcctcccattcccatccttcctcaagcctcagtgccccccacccagagcaccccccatttttacccagccactttctttcttttattttttaaggagtcttgctctgtcgcccaggctggagtgcagtggaatgagcttggctagctgcaacctccgcctcccaggttcaactgattctcttgtctcagccttctgagtagctgggactacaggcacccaccaccgcacctggctgatttttgtatatttttttagtagagacagggtttcaccatgttggccaggctagtctcaaactcctgacctcaaatgatctgcctgcctgggcctcccaaagtgctggggttacaggtgtgggccaccatgcctgctctactcagccactttctattcaagacccagctgggccatctctggctctggggctcacgcctcactgccactgttcccagtgccactgacctcagtcactgcacatgtcacttggaagaggctggctccacgaggatggggcaccccaggacctggcatgtggaaggcactatcagtatgggttccttaaaggagtgaaagagcagatgttgtgcacagtcaggaacagaaatggggcagagagaggcaggtatcctcatctcaaatacacgcttctcacagggacagggctgagggcacagagaggcaggtgtcctcatctcaggtacaaacccttctctcaaggaggggtcagagagtgcagagaggcaggtgtcctcatcttagatacacacacttctcccaggaaggggctgaaggcacagagaggtatgtgtcctcctctcagatacatgcttcccccagggagggggctgagaatgcagagaggcatgtgtcctcctctcagatacatgcttctcctagggagggggctgagagtgaagagaggcaggtgtcctcatcttcggtgcacatgcttctccctgggaggggctgagggctcagagaggcaagtgtcctcatctcagatacacacgcttctcccagggacgggctgagggcacaaagaggcaggtgtcctggtctcaagtatacacacttctcccagggaggggctgagggcgcagaaaggcaggtgtcctcatctcaagtacatgtttctcccagagagggactgagggcacagagaggcaggtgtcctggtctcaagtacacacgcttctcccagggaggggctgagggcacagagaggcaggtgtcctcatctcaggtacacgcgcttctcccagggaggggctgagggaggagccagccccaccatctctgtgccttgctgacccccagcgtcctgccctgaatgagcaggctggagctgacagggctgaaggggatgtctgcctgcgggagcagaaggcatgcataaaaatgcaaatgccaggctcctttcctccctgcgctctgctcgtttatccctctcagacagataaaaaggaaactgtgccactgaggacagagcccctctgggtaaaaaagcaatagcaaagtgacaaatgtcatgtgggtttaagctaagtcccccatcgttacaaacccacagggaaataagcctgacaaatgcgcagccccgctcgctgcaccctcttcctttgaaataacttgagccctgaaaagggagaaagaaggaaataactcaaaaatgttaaaagcaaagtttctgtctgcaaaccaaatgggctgaatttttataggctcgtttggaagagcatgaaaaatccagttgtcagaggagcctctctctgccagacagcctcggggagagacacaaagggactacctaaaacctaagctgctctgctcccctgctcccatcccagggctcagcccgctctccccagcccctacccttgtcctgagggctgctgagccaaaagggagggctcctgtgcagggccaaggtgacctggagccgctctgatcccaggctcgcggagggcactgtggaggaccgtgcaggaagacaggttgctcctgccagttcaatgcactaagaccacacggctcccctccgcacagccctcgctgagtgccaggcactgctctaagcccttggcatgtcctttctccttcaatcctcacagcaactctatgagggaggcattatgattatcccacttcccagatatggaaactgaggcagggaaaggttcaggtgcgcaaatggaagtggaggatttgaacaaacacaggctctaaagctccctgccacagatgctggcagggtcccacccggtgctcctctttactggacagtccacagcacagcacaactgctaacagatcacagctaccccttccgagagaatccactttatccagagatgcctgggagatcgggaccacacgccagggggcttacagccaagcactgactgactggtatacaaaagccccacccctgcacctcaaagggaagagaacgctggtgctgtcccctcccgagtccccatcttagcctggccttctttccccacaggcttctcctgagagcacaccctcgacaaaacacttgcacaagagtccatatcacaggccctgtttctccagaacctggttacacaccagcccacagacttaaattagtccatacattcttttttctctctgtcccttaagagatagggttttgctctgttgcccaggcaggagtgcagtggtgcaatctcagctcactgtagccttgaacttctgggctcaagcaatcctcccacggcagcctcccaagtagctgggaccacaggcgtgccccacaatgcccagatcatttttttatttttatttttactttgtagcagagatgggtctcactgtgttgtccaggctggtctcaaactcccggcctcaggtgattcttcttcctcagcctcccaaagtgctggaagtacaggtgtgagccaccttgcgcagcccatacattcccatctaaagtgctaaatgctgtgcctggcacacacagctgctcagaagtgatattcacatcaatgatgagggcccccttcattgttctcactccctcattcatccacaggccatcttcggggcatctgtggcttgtttagtaacttagtaacttacactaggagttgagaatgaagagtcatggggaaaagtaacaatcaataaatctactttttttcctacaaatccttccaaattaagaggtatattcatgcttcctggagccaggagtgcaatgattttcctcctccctcccccagatgaagggcccctcctcagtggagacgttagcctcattaccagcccagactccacttaagggtttgcagttggcaggggttcaccccccttgacagcgaggcattgtgctgattggggaatgaaaacagaatgtcagagacctgccgtgctttcctttttgatcaagtctgtgcagcagaaatgagagagcatccggcatcagcatccagactcagcgcgctcatcccaccgccctgcagtgcacctaatgaatctcatttactggcaaagacaatgaagtcgcccacatggcacctgccggtctcataatgaatgtcctcccccagccgttgggagtgagccatctgggagcggggcgccataattgggccagcacttgcatgagaacagcctccagtggggaatgttgtaagacacttgtcccagagatgtcgtaagagggcaggaaggagctgttttcaagggaagttaatggtccttagcagagggatgtgaagggatcatctccctaagcaaagccccggcacagctctgcctattgtgagaggtacagcagcactggcttgggacaaactgtccccatggcctcctgggaatagagctgctttcctggggaggcccacggccatgtggcagaaggcagcaggtgtctcccaccaccatccacagaggcctggaattgcgatgtgaagtgagccatctctttgcaagggaatctttggaggggcaacatctttgcttggcttagcgtggatgatgctggcctgggagttggaagacctgatgggatgctagttcagcccttatctgggaggtgggcttgggtgagctctccctcctcctagggtttttcagggtgtgcacccacagagagaaataaagcatggggcacatctgttgtatctaaaaccaacctaatgcaatggcttacatgaaagaaaaggcgagtgggatggggcgtgggatctgttagcaaacaacactaaaatatccgggagtacattctggcatggcagtggtctagggactctgataatgccattggggtttcatttggctctgtgtctcagttctatgctcccctgttggacttcttccctggttggctcttcctccctggtagaagggatgtgcaggttctggtcttacacatggaaagggacactctccttcacttgagcccaaggcttgcctggaccccatgggaaatatataaccatcctccaatcactcactgcatctaggggaacttggcatcccggtatctaggctgggtttaaggcaaggagagaaaccagcccctcccagctgcctggatggagaatgaaggagggatgactccagaagaaaagtcaccgaaagggggagtgggtgtggagcagggggaggtgggaggccttctgctgggcttgaagcagaagctgcttcagagaatgcacaaaggggcagggtggaggctgagggcatttcagacccgctccaccaccttccatttggacattggatagcctttttccaaagtcacttctgatctttctgcaatcacccatcaccgagctgccaagccacaagcttccttatggtagaactgattggctgaatgtgcttatctcagctgaaatgtgtggaagggaaccttactctccaatcaactgtatctctcttggttcggcaaacatgggtactgtgccactacgttctaagcaaggggcagaggagacaaagctctgtggcttttaggagatggagtcacgaagacataaaagagagttttttacttcagagggcctaggactgggagaggggagtggagaacagggatgttcctggagagagggggcatgatttattctggtgaaattgagacacggatgggaagcagacaggtgagatgcaactctagctggaaaaatgaggcattttgtaaaagattgccagctgcagagcctagacttgatcctgtaggcatagggagtccttgaaggttgtagagtgagagaagggcttgatcacaactctgctttaagaatgtgagtttgacagtgacttataggatgaagttttgtgtgcttgtgtgttttgtggagtggggatggagggcacaggagaaagaattgagaagcaaaaaatgctgtttggaagctgtttcaatacccaggagaaataacgtctgttttagagcatttggggcattagaggaggggaaggaaaacaagcatctttaatatgacctcagcattccaaaaatgcgttcatatccatccttatccctaggatacaaacgtgctgggaggtaagcagaatgagtagcagaaattccattttacagatgaaaattgaaatcaaaagggcaagagttacacccatcagcaagggacagaactgaagcaaaaccagggccaccaacctcccaccaccccctgagcctctgtgcaggggcacctgaaccctgatagatcactgctgttcccacctcaggcaggtgacgggagcccacctcgacactcctaacagctaccaaataaagcaatctgtgctgctaatactaatataaggtattgattatcttactgcaggagtcctgagatggtcagctctggctgccgaggctggcggcagcagctactaaattgtgtttatgggaagctttttacctgaaggggtcataattcactctcgatcaataaccgatcaatccacctgctttgcacattgcaaatcctccagatccgtccgcagagagaaagagagaggaagacaatctgtttattggaaaaagatggcagaattacaggctaatgcagccacttaggctggtgattacataagctttaattttttttttaatttaagtgaagtattttgagtgatatgctgagtccactgaatttaaaaaagaaggatcttggttggtctgaaaggatcagataagaaggatctggtattcattgagcacctacgatgtcccttgccctgtacagaactctctcatttatcctaacagccagcaaaggaggtattattcccacttccactgggaaacctgggactcagcgatgggaaatgactagctcaaggttagtgattgagctgaaaatcaaaaacatcgtctcccaacagggaaataagttaagtcaagggcagctgaacttgaagagcctgagtcccatttcggggctgggataaggtggagttatggcaggaactgcagagggatggttgggagagggaggggcctgggaggcttgcctgggcccctactgccagcacacatccccccactatttgctggtggagttgcagtcctcagacgtgcaggatgcattagagagccatccagggccaccagattccctctagctgctgctctgctctccagcccccagtggcctcccagggcccagaggaggaggccattgagaacctcaagctgcttccccactctctaggaaactccctgcacaaacccacctgactcaacccagccagatccctccccagcagcccttccctggtctctaagcctgagccctctgaaaatgctttctccctcctcctgccaatgaccaaggtccccaactccaagcaattttcagagcgacccacttggggagtgtctgcactccaagttcctccttcctctgagctctagtccctgctctcttgggtccctcctggcagggtggagaggaggaggctgggttggggccactcggctccaagggggcctgcatccttgtccctgcggctcctatatgcaggcccaacaagctcctggagtccagcagccatagatctaaaggcacatcagcctctggttcattctctttcaaactagttcagatgtggagttctcccccgatgtggctctgtctcccttcttactgcagtcaccatgggcagaacagaacttgagtcctcagagacaccatgatgaggttgaggaccgaacctacgatcttgtaacacgaggagtttcactcactatgatggggtcttgcatctcagctagtgccccactcggaagaacagcatcctgataggccttaggcggtgcactggcaccagggctcagggacctcaccatggtcagaatcagatgaaggaaaacagttttccgttaacaactcattcttcctgctttttttgctgatttgttgaaaattattttccccctaccgtttcacagctaattcattgtccctattgaggccactaccctgattttggagactgtgactagaggcaaccgttcagccttcctggaaaatgtctctgtttgggtctctctgtaataaggaattgcacgtggcattgatcatcaagaactcccacagcattggctcaattagcaaacagttaaatgtggcagattgcatccagatagcctccctcggagtgacagatgtctgcagtcaacatagggaataactcccagagattggctgaggccaggcccaacccctccctggtggtcagagcaaactccagtggcctcaggccccacacttctgcacagggaggggccagctgttcagtttctcccctggagccccttacctccccagggagagtcttggggatcagcaaacctggactatttgccctgaatagtcccagtccccttggagggaacccttctctgcagaaggcaagggctgagtgtgcccccagatgtcagcccagtggtctttgtctcggctgtgcctaccttcctgtgacagctgtagagacagctgtaaggtgacaccatcaatgcttttctggttaattaactaaatacgcattgcctagggcctcagtgtgagtaagtttcaggatgaaaagtgccaattttcctgcatgtatgtgtccaaactattttccttagcagttcttactccctttttctcatccgttaagtcaagtagatgtgtagctcagctgaaaggctcagaatgacaggcacatggaaccactaatttagataaatgatgctgttcctgcttcctggagacacacctctcagcacattccagggcctgaggaactcagagggggccagcgggagggtgttacggctgtttcttgtgtaggaattaattaagtgtttttatcggctacatattccccctgagcctgttttattctagatgatgttatgatcttaatgcttatgtctctccaaaattcccacattgaagtctactccccagtgtgttggtatgaagagatggggcctttggcaggtgacgagggcatgagggaaaaggaggcccgtctgtccctcccactgcacaaggacatctagatggtaccaatggtagaaatgggtccttgccagacaccagatctgcctgtgccttgatcttggactttccagcctccagagctgtgagaaataggttcctgttctttctgaatcactcagtctaaggtattttgttattgcaacccaaacgcactaagacagatgttgagagggcctgttttacaggaagagtccacgtggcctaacggcttcctccaagagaaatgtggtggtcaactgcttgcccccacctctcctctgggttctgagccttgcctcatgaggctggcctccaaggactccatccccagggcccttgtgctggctggcctcgacttcttcagaggtctaaaggctgaaggccccagtggtggccaaaggcaggaaggctatggtcatgaaagccacctgtgtggatgagaaggcattatgtccaggctcccatggctcagatggggacaccaggtcctgagaaagaaaaggagtcccaacagtggttggaaggaagatggcaatgaggactaagatggccacacctcggaaggaagatcatcctggcctctctctctagtgccccttcagcagctcctccccaaggagtcgtgatgtcctggagagtcagcacattggaaggttttctgttttaatttccctcccactcaaactatgattttccgcatatctggagcaagggaggcccaagcccgggttctcttgggcagcagatgtgggaaatgctgagtacaggagctcagatgtcctcctagggtcaaaaattacatactggggagaacttgcccagcttggaagaagcagaaaatatcagcaagaacagagaggataactttttaagagtaaaaattaagtgtatttatgtcctacacattccccagagcctatttaacattcagatacttagaagatctacctggattttgtgcaactctccttttagctttgctgtttttgttttgttttgagactgactctcgctctgttgcccaggctggagtgcagtggtgagatctcagctcactgcaacctctgcccccaggttcaagtgattctcctgcctcagcctcccaagtagctgggattatgggtgcctgccaccacactcagctaacttgtgtatttttagtagagacggggtttcaccatcttggccaggctggtctccaactcctaacttcaggtgatctgccctcctcggcctcccaaagtgctgggattataggcgtgagccaccatgccccacctagctttgtaattaaatgtaaaaacaaataaacaaacaagcccctccaagctgctgtataaaaagccctcttaaaaaccatcccttgtagggtctctctaaacacagacaccaggacacatgcaggctcccaacctgtaaccagcagagaggctttcagagatgaagatgaatgctgcaaatccagccacaggtcatgcaagggaatctggactgcacagggaaggggtactgtgttcatgttgggggctctcaggatgtggctgctggtcaggagagggctgacaaacagtagtttgtatttcatgcatctgcagaaaacagttaaagagaagggatactgggcctggttcagcaaccggtccaggccggtcagccttgtacaaactccagatccagtgccctggaaagtgactgtgggaggctcagcgtgcttccaagattgggctaagagatgccagcccttcctcagaaggccgagtgggattgcagcaagggttctcttcagccaaggggaaataactcttgcttcaagaatccagacaagcacatcacaaaagcccaactgtgggctcagagaaccaggtctctgcatctaacctgacatgtgaccctaagcaagcaacggtcctgcgtagacccttatttcatccacctgtgagtgcagaggaataacacacaaccctcactgcatcttgaatcccatctgcaccctggaatcccaagccctagcccaccctcccatgagtgtctcaacctggaattcctcattagagcatctggctgccagctctaaaggacatctgtgtagagacctctgagttagggaaccccccgcccgattttcccaatgcttcagcaccatatcttctctaggaaatgcccatctatagaaaatgaacgacaggggcagcccaaacagggtcccttgccagagttcccagcagaaatctggcttccctccctgcccccgcagctcacccgagatgacccaacaacatgctcagccttaccccatgccacctcctgccacctttgcaagccctggaaggaaggcaggattgttcttgatttatgtacaaagaaactgaaagatagagaagttaaatattttgcctcaggttctgcaaagggagagaagaaactgggagtcaaccgaggaccatcaggctccaagctacacacacccagcttccagtcaccaggtgtatatatttttagagacaaagtctcactgtgttgctcaggctggagtgtaggggtgcaatcatagctcactgtaacctccacctcctgggctcaagtgatcctcctgtcttggcctcccaaagcactggaattacagggatgagccattatgcccacactgaccacacaccaggcacgtgaagatggagggatggacgaatgtcagaaggagcccctgtctctagggagctgacagcctagatgagcagacgacatgcaaaaccttttaagaggcagggagagcagctggtgggagtccttgacttcccatatgggcacaaacattccaaagaggtccctgccatggtgaaaaggcatggcgcccaccaccagcaatccagcccctcgccctgcctttcagatgtgcattggtcacagaagctttactcccaaggctttcagaggacagaaggctagactccagcatgagttgggcatcattcccaaaagaaaactgcagtcaacctaaggggcttatttacagacaacactcaaagccatgacactttacttgaggcctgaatttgcttcctcgtgtgaagaaagtgacccctatttcagcccatgcaaactcatttctttctgatgcactttgaagatttggctctatggaaaagtgcttggtgaggggacagaggtgagggtgaacaaggagatctcatctgaacttgttccccaggtccgcatcacagcggcttgattctggctccttgaaatcctgtccacacacaacaagataaatcagagaatggaatgaaatacaacccctggaaattttcaaataatgaaaaccaaaggtcggcagtaagaatcttttctactggggtcaaaactcagttcctcttcccccctcttcctgcccaatttcacataattagtctctactacattgtctttgggggttccaaggaccggacattccatcatagacctcaaatcatgagcattttgcttccacgcaagttacagttttattgccttggctggttgtattgaaaattaagcagtcatttcagggggctttctagaaatcagttacacccatgtctcaatgttgagagagaccaaaagagaagaaacggcacaaatgtctatatgtgatgtcatcagcacccccagtgtgccatccccatcccacacacacatacacacacagctgtagactcacagttctctttttattgtaaagatgatttccctgaagtatttttaagctggaaagattttctacaagctggtgaaaaatcgctcactgcaggagatcctatgcattggcagaaatccagcaaccccatgtattggtaactggcttggtaatgagtctcttccatgtaaattggctcattattatcaatttttgtcagctcttgagtgagtcttgatctgctcccccgtctcggcccaggtgtcagcatgaggcgaacaggagtgtccagatctgctttccatgccaggcacctaagacctcacatctcagggaggacggagagagtgaggatgacagactccatgccattagagctttgaatttaacgtccagaacagagagatgttaaggagacttgcaatgaggtgttataaaaaccaagtttgactgaaagagctggcaggcgatgcagatgaacactttgtcctgtgattcattgctatcaggagaactaaatttgtacagcccagaggagagatgactaatgggaggcataataattgtcgatttatacctgcgaagaattaatcaagaggcccagaggagagagtgttcggcggccactccaggtgcaagtgctgggggtgggcagagccaggaggagccagagaaattaggctaaatagcaggaatgactgtaataacactgaggtccattaggcagagacattgcatggcctccaccatgggatgctacgggattgccatcagacagacctgcacaaggcaacttggggaatagatctctgcaatgatcggtggatttgacaatgcgtctggaagattttagggtgagatttcctcatcccggggccacttctcagggaactgaaaagctgcctttgttttgtagacaaaacttccttcactatttcaattaaatgtgtcttagagcacgaactgcagaaaaatccctgtccagtgcaatgtgggaggcagagggagtttgtcatccttagagtccatgaatacctactaaacacctactgtgtgccaggtggtgcaggggcagcctcctagctgtggggagcttgtgtcccaacccagggaggcaaagacagcaggagaggcaggcaggcccccaggagagtgatgctagctcagccaggctgcagatgatgcccaaagagaaccaggtcaacagccaacacctctatgcaggttttttcacagattgggcccttcacaagtcagtctcttttcctataaaggacaggcaattacccaaatgtgattggagaattttgaaggcttaagagacctctccctccttcccaggcctcctcatgctctcagcttgatcaccccgcactgttggctcataagcaagtaggctgaagcatgcagcaatgttgggaatgttttgttttgttttgtagagatggggtcttgctctgtcacccaggctggagtgcagtggcactactatggctcactgcagcctccggggttcaagaggtcttcccacctcagcctccctagtagctgggactacaggcatgcaccaccatgcccaggtatttatttttattttttgtagagatggcatctcactatgttgcccaggctggccctgtactcctgggctcaagcgctccacctgccttggcttctcgaagcactgggattacaggtgtgagccatggcatccagccttagtaaagttttaaattaggattgccaatgtttaaaaaatgggagctgccatacaaattcgggtttctaacatgtttggcaaactgaactgatgatgccagaactgcgtcctccacgggcagcatcagccatggccgggaacgtgctgcactttaagctctttcatttgctgcagtccccattgctcctgtttgtgttacagctggcctgtctcattctctcattttcctggctcagcttctgtgggaatttcagtttgttgccaccctgagctaaatgaccagaaatgcaaggtggctggcctgtattaactttagagtcttgcagaaaggctcctaatcagttataaaattcagtgcttgaatttgatgaacatcctcagcagtcacttggaaaacatttctgtgttttgcaaaactgcaagcaaatacacaattaccctgtattctttcctctagagcccacgctctgaatccttccttctgctcactggtagcatgaagcttataactttagacaagctcgtttgctcccttttatttgcaaaggaaatgtataacctcactgagctttttttttttttttttttttgccttggctgccaggagcctcgtctagcaatgctgagttgcggttcatggttcagctcaagagtttgttgcattaatccctcaccttccccgaactgatttttctttttttttctttcttttttttttttttttttttgagacacagtctcactgtgtcacccaggctggagttcagtggtgctatctcagctcactgcaacctttgcctcccaggttcaagcaattcttatgcctcagcctcccgagtagctgggattacaggcatccaccaccacacccagctaatttttgtatttttacaagaaacagggtttcaccatgtcagcccagctggtctcgaactcctgacctcaagtgatctgcccgccttcgcctcccaaaatgttgggattacaggcaagagccaccacgccctactccctaattgatttttttacctgtatttctaaccagtgagttttacatgttttctttgtaatattacaagctgcacttgatgctttttgaaagaaacaaaaggaacacctggaacagcaataaactgcaggaatgtcccagaagaaaactgggatggaccctgccctggagctgggaggcaattagagggcgggctgaggcagaatgatgatgcatgcagcaatgttggcggctgctcccagccacagctgacactgtcagtggaggatgcagttctgacatagttagttcagtttgcctgggtgacagagcaagaccccatctctaaaaagcaaaacaaaacaaaaaaccccgacattagtgagctggaaatgtgcagcgaggcagcttggaagcaaagctcgggatcgtgtggagaaacgtgtgtccgatattattcctccgatgcaccagcaccatgattcctaccacaggcctgcatggtgggggtgctggagtatgcagggaggagtcagacaggcctccagcctccaggggtccagtagaagaaaaatagcagcttatagctgctgctggaatgcaccatgcatcccttggcccccagatttcagcccagctgcagcagatgggaccctgtgtttgccagggtcctgcctcaagcatggaccgaggcttcctcaatgccacaaaacactgctcagccacacgcaggctcccccaggatgtttgggggaatccacaccagggcagcctcagtcactgggaaatagagcctcgccctcctgggcctccggtgggaagctccggtggggagcacattcttcacggctccacaggaggtcctagaaggctaaggccagggtgcccacagtggccacctgccgagtagcacacccttcatggctgctctccctctccttctccccgcccccatgtccccattcctgcctcctgggattgcccccgacatagatgacctgcaaccaggttcttactccaggatctgcttgtcgaggtactcaaagacagtgccagaggagtgtaactgaggctggagtatgagctgagtgattagaaacggcttcaaggaccaggagacgtttgaaccagcaaaggctttgctggacaagcagagagggaagtgaggagagacacattccaaggggaggcccagcgcaagcggcagagagaaggcacccagccggtaaaaggattggtaagttgttccctttgtccagatcatgggctgcatgatcaaccctggaaaatgagatgggaaaatagggtgagctgggactcccatgggctcagatgtgccactgtggagtatgagcttcattctgtcagtggtgaggatggtgtgatttggagaagcagttgagcggggaataagggattggatgacagattcggacgaagactgtctggggaaggtgggccgccccggctgccacctctggagtgggcattttcaccatgtgatccaacagtgctgtggtgacctgtgtcctctccatgctaggctccaggctgggtgctcacagagtgcctgtatggctggcaggtatggcgcagctcctgggctcatggacgaagagtcagaattggtggatacaaagttgctacccccaggcaggccagagatgctgatcaaaagtgctcaggtggatgggaggtcatttgaactgaccctggaggggcatatcccactctccccacagccaggtgggctccaggtggctcctgagtggcgtgccatgagcttattatagggttggagtcaccctccttgtctgggggtggctgagaccagcatggacaaccccaaaacacagcttaagagtaaaataactaacagaactttagaattaaattacatttactctcacatttcatttgcccacatgacatcaaatgaccacgctgtctcttttctctccatgtaaagtggccccctgtggggatagcccagatgtgtggctatggtgaggacaagttgtggaaaggcagcctaggctctgagtcccaggtcggcctcctcactgtgcccgaatcccctgtccccctcacccggactgccaggcggcactggtttccacagcatccatgctcccagaagaactggaggttgactttaggaacttcaaactcaagcttcccatattcacacatccccgtttctgagctgctttctcttcaaaaacatatttcttactttgaggtgtgaggtctttgtaaagtgtattctgagaaatatgaattccacaggtcattaataggtgttcctttaaaataatgattcacatttgctataaactgaatgcttccatctcctcaaaattcatatgctgaaatgttaacctcccaggtaatggtattagggggtaggtgttttgtgaggtgattaggttacgagggtggaaccttcataaaaggatcagtgccttaggagaagagacatgaaagagatcacttcctgtctctgccctctgccatgcgaggaaacaggaagatggctgtctgcaaacccggaagcggctcctcactggacaccttgaatcttggacttctttacctccagaaacatgagaaatcactgtttgttgtttaagccaacttgtctatggtatcttgttacagcagctcgaactaagataaaatttagacagctttaagaaatgatgtgtggagcaaaatcaaatgggtttctttactactggacatgtcagagccttccatgtggggcctggcaccaagtgaaaacacaggacctgtgttcagaaagtataaagaattgcaagaccacagaacgtgacactaggcgcagagccctcctgagttggagcccgagagcccacacacatctcacccctgtgcagccagccctgcaggataagccaaagttgccgtgcacacctgcatgtgcagtgcatgctccaagaatagaaaagaggcaccagaccgaggtcacaacgtgttcctaacatattcaaccactgattgacagctctgcagaacacacttagggaaatcctgcttacaactgagttctcattttcctctaatttccaagctccaatactcagacatacagggaaaatgagtagtttccaagaaccccacgggacagttgtacatagaaagggaagacccttttcatctgctagatcttttttgtctcataactgggttagtgttttttatttggggatttttctggaaagtgaggtccactgataatttctgctcattccttattttcttccattcttttaaataaagcccagcatctctgaactacgaaaacaaattccaggcaacagtagcaggcaatttacagtgatagatgaatataacaaaaaatagcacgcttcagctggggatggtgggcagtgtttgttcttagaatgccagctctgttaaagagctgtcgggcctctccaccttactctgcccatgcaagaggccccgtgacacccctaggccactggcttccctgattctcttttctctggttatttatgcctggggagggagtgggggtaggagatgagggacacaagccttagcactgagtcacttaaaagtgggtggagtcaaggctgttccattaactcccactttcctcagtgccctgcttggctggagggaccccacccacactatctccagctgctctgactcagaactgccaggtccgtgccactgtcatttctggcctcccactctgtgctcctccaggcctcagagttagctcgtgctccgctcctttctaccccatcctccttccccactgtctttgttagggtgcccacctcctgaaagaagcctactggtttgttttgttctttgagacagagtcttgctctgtcacccatgttggagtgcagtggcacaatcatagctcactgtagccttcaactcctgggctcacgcgatcctcctacctcagcctcccaaatagctgggactacactactaccaccttcatgcccacctaagtttttattttatgtagaaacagggtctcgctatgttgcctaggcctgtctggaacacctggcctcaagtgatcctcctgcctcagcctcccaacgtgctgggatcacaagcctgagccagcacacctggccaggaagtctactgtttagctgggagcaggccgcatgctggtctgggcaggccagctctttgcatctggagctcacaactctgtttaccacagacacgcactgtgcacctactgaatgtacgtgctgtacacttattgagggcccctgcatgcaagggccctgaggacaatttctcacgaggcttgcagctcctgcccttgaaaagcccaactctggtaggagacaggaggctaaaactaacatgcggagcatcccacaccctactctggcttagcccctcccaggaatgtccgtcatctgctgtttacaacttcaactcctcagggggcccttttaaggcccctcagcatctggcctgatctctacctcgcctgtccctgcccctccttacccctaagcttgcaagttccacccttcatgtgggcactcagcagagcatcccgcctccccagcctctccctgggtgttcttccctctcctcctgcctggaggacaccctctccccttccaaggtgcacttcaagcattcacttctctaggcagcttttcaccgtccccacctccccaccaggtgagggtaacagctcctcccacctcagtgcctctgctggaccgacacaggtctctaacacagacccagccaatgcctccctggcagaagtctgtctctcccgccaggccacgagcaactgaaggcaagaggggtctgttcatgtttctttcccaaagccagggcctggtggtggctactcaatacatcagtgatgctctgcattaatagcacagatccagaggaagaagagaagtgggttaaagggtgcaaacatacggtaagacaaaaggaataagttcagtgtctgatagcagggtggggtgatgatacttaaccaaaatgtattgtactcaggcgatgaatatcctgaataccccaattctatcaccacacactatatacatgtaacccattttctcatgggtttttcataaatctgcactttttaaaaaaggaaataagcagtgtattaatctgttctcatgctgctaataaagacattccagagactgggtaatgtataaagaaagagtttcaacagacttacagttccacatggctggggaggcctcacaatcatggcagaaggtgaatgaggagcaaaggcacatcttacatggtggcaggcaagagagcatgtgcaggggaactcccctttataaaaccatcagatctcatgagacttattcactaccacaagaacagaatgggggaaactgtccccatgattcagttatctccacctggccccgctcttgacatatggggattattacaattcaaggtaagatttgggtggggacacagccaaaccataccaagcaggtatgtgcaaaaaaaaaaaatagcgcagatccaagcacctcggtcacaagccctggtcccaaggggcaggagtgacttttccaagctggaccccaccaaggcaagtggcagctatgaccctctttttcctcactctcatgccctctacactctcaactctgcctctcccttcctagctcagctttcatgatgataatctcagagtccacagcactgtgttagaagacagagaagagaaaaagaagctcacagtcttaagggtgacagccctaaaatattgagttagaaattgcctggggactcgacttcacagtcatggcaaagtagatgcaaatacatattcaaattcaatgcaaattcactggcaaatttcctccctcctccccaggacccagtgaggctggcagggcttggatgggcgatgcttgcatggcagggcctccctcctcctcttagtgccctccatggtacccagagctgagttccaggcagtaagaggctgcaaagaaccagtcccagaggagggcttcttctcagggacatccttctggaggcattgccattgtgaggccttttgggatgggcccatgagggacaagcttcctgcaggaaggagataggccctgtgtgcattctgtatgggaagagaggagccaggagagcaaccggaaggaagccctgtcaccatgcagcctgagtgctcactgcagggaggagaagctgcagggcacatctcaggggacagaagagaggctggtggtgcagaaactcaggagtctgagaaagccagactggttgtaggtggtggagaggaaggaagggaggcagagcaagttcaggtttacttagggctcctcctgagctctctggggacgtccaagaggcctggagctcactgaggctgggagaggctaaccttagccttgggtcacgcacaggcatagatgacattactccaggtggtccttcctgtcctggaggccacatgtcccagagccacagacttcttgtttgggaagaggtggacatgaaatttctgctttggcagagagcccaagatgaggagatgccatcattccgacagcctggcaggcaccttgtcctttcctgctgacttggcatggcagggttgctcctccagccacagcagagcctggccaccagcaacagggctccctagggaggcacatgcttgactcacttctgtgacctctgcaccagtggattgcatggggacaggcttgcttcagcacctgggagagctccctgcgtaggttagtggcagtgagggtgagagcatgctaaatccaagatggccctggggaaacagagccaagctggaccacagagggaactccctgattaagagtgcagcctccacccagcgttcttaacagtgtaagatacacgtaatcatgacttactgagcaccggctacatgctgggcattgtgcacacatcatctctaaccattgctacagccctcaacttgttcccatttcaaaagcaaagaaaccaaagctcagagtggttaagtgacctgcctaaggtcacacagcaaacattccacagaactacccaaaggtggttgttgggaaatatgggggtcctccttgtccttcctctcacaatggtttatagatctgccctgagtgtggttttggtgccttctttggaaatccatgggaaagaaaagtttctccatggggacaaaaagtttcccacagctgggcatgatgaccatgactttagaagattactgcagggactcattaaaggacaatattcttgtcaggatgcaattaaagtccttcccccttccatgtttatggaaagaaggaatgggcagaatggcatctggtgaattcggagccttgtcggaatgcatcactaagctcacggtggcacctcggccctctgctggcctcacaccccctccaggtgcctgcccatcatacagtccagcctgtctttgaggctaagagaagatgattgtcatctccagctgccccacaaatccagctcttctggaaacaggttttctgatgaagaatgcccctcccaattcccagcccacacggctcaagaagtctgacttcactgtggactccacagcaggcacctggccaggcatgacatcccctgctgaaggtcactggcttggcatggacaggcagcccaagcaggcagtcagagccactgggcttcagctcttagaccaccgttaggagcgggagccagttttccctgaggctcctggctgaggaccactgagggatgcctgaggagcagacagcatgaaggagggcagaaccgtcgtgggatcctggtgacactgttcgcatctgcatctggccatcccaagccacaaatcctggactttcccattgatgtaaaccaataaaatctccttgcctgagctacaggaggttctgtttctttcaaatgcagacaaaatattttgacaaattacctctccaggcaattgcttctggtgttttttttttccactctaaattcaactttctaggctacctaagtcctgctgccccatagcagatctcctaacgtctccattatctgacctgttaccaggacatctgggtctccttctgtaggacttgttccccagcctgagacttgatgcctgtctccccatgttaagcccagtgcccgtcatagcaggtgcacaaaagtggtttaaacttgtgcctcctaaacctgcaccccccacctcaacatctaaagcagcatatgaaggtcaataattgtgtactcatctttggaggaatgagaccccctccagccccagctggtctcaccttcacacctccacatgacctcagaaaaagatgctggcatctaagcatgttacacagggcacctggcttgacctctctttgtcaacagaatcagggtgcatctcagaagacctgtagaggaagactcccttcaaaagcccagagcatatgggctgaaggtcacttatcttccatctgtgatgccccacatttcccctggggctttgccatccattggcattgtcattctctctaattaggtaagtcgagagagttggggaagggggagaggaggaaagagaggagagagaactggagaatgcgcattcctaaagatccatgcacaacacatttggagttgccaattcatggcacattttgtaaatttccattacaaaggacagaattgtatcccattccaatagaatgcaaatgaattcctttgtgtgtatattcaatttaaagaaaaatatataaataactgtacaggtggtggaatgattatgatgaatagaggagcctggatcctgagatccacaaacaaccatcattatcttcttgagtgacctgaggtgagtaacttaacctctgtgaacctcggtttatttgtctgtaaagcaagaatgatgcacctgccccacccttctgaactaacagaatgaccgaggctctgagcagccaggggtgctgtgagatgatttatgagccttgaccttgggctgctactggaaaatcaaggctccaccactgcagtggggctcttactaacaaggcttggtagcctattttggagtctgtcccaaaagactgaaataaattaacttcatgagggattttttcccccaaaatagctataatctataccatcagtcatgacagagcacaaaaattcaactgcctacagggctcagtggtcccataagttatggaaaaaggcaaggtataaagcaatagggaagggtgaagactgtggcaaactgttgaatccatgcccttgccccatcttaggggccaccaagctctactagcaggctgtcgcatggggctaagactcaagattgacagaaattcccatttttttagtagaaaccagaagggttgatttttacatgaaatctcctctggttaatttttttttaatttgacgactcaatgttaaaacttttgtaacactttgtgagagccaaaacaatgtatctaggagctagatttcacccacagcccaccaaactctgtttagcaatattgcaatcttcctgttttgattccatttttcaagtgtgtaggttatgttgactttatgtcaaaaataaaagcaagtaacccagcaaatgccctcaatttgaacaggggtttcttctgtcaccctgcacctgcacacaatgaatccacatggggaaggcagtggcgttcactctcttctagcccagtcatcatggcaggctgtgctgttcctgcacctcactctctccacccaactctgctggaccacttgggcctcccagcagagatccctgaagatgagaaggagccctggaatatagtttatatgttgtcccaaggtaaaactggatgtttctgtccatttttgtttcctgaattttacaagctctgcaaattaagtgcatacacacaccgttgctgactgccttgttccgtgacaaggaagtcagactgctggaccccaatgtgcccatgggaagaaaatgtcttaattgcagcccaaacacacacgcatacattcactcaaccaaggcattctgccagcatgctgtcaccacctttgacgtcccttcttgtgggtttgtccctttaatttcttttttttttttttttttttttttttttgagatggagtctccctctgtcgcccaggctgtagtgcagtggcatgaactcggctcactgcaagctccgcctcccgggttcatgccattctcctttcttagcctcccgtgtagctgggactacaggcgcccgccaccaagcctggcaaatttttggtatttttagtagagacggggtttcaccatgttagccaggatggtctcaatctcctgacctcgtgatccgcctgcctctgcctcccaaagtgctgggattacaggcatgagccactgtgcccggctgtccctttcatttcaaaggggtgggtcccttctctctttttcctggactctttattgtactctggccacaaacactatttgctcagcatctctggagggcaggaaagcctctttagaagttaattgggtgaacattcagattgaggggcatgctaataatcagagcatagtaaggggattatgtgttagatttctagataacagtgttttacccccctttttatgtgtcagcaacaataaatcgtctttggaaacaaaataaaaaccaaacccttgacaaacatgcaaacacctggatgcagaactactaaagctgatgactcttcgtgaagtccatagcactaggtagccagtttcctgagggcagcatcgcacacctgccttgacagggccagtgtgctcactgcccagcacagtccagaccctgcccaccaaggacagggactcagcgccagagaaacaaatgattcgatggagttgtaggaggatttccaagaccaccatgcccagcttacctgtatccctacagattaatgaccattttagggaagtgtttgaatgaaggaagaaggaatataattaaataaacgtctgtgaaattagatttttatttaataaaataaggcatcagagatatatgagatgtctcatatatctataaaatatatatgtaagctttatataacatattatgtatttacacaaaaagtaaaataaaacatacacacacacacacacacacacacacacatatatataggcaagatttttttcatctgtcagataggccacaattaaggggtctgccgagaccctgtgttggagagggtgggggacccaggcgtggtctctgcagaggacagcagtcaccaggattgctcactcatccttgggacacgtggcaggatggcacagatccattccatgtgattcctttcaccaatcaaatacaaaggtgtcacttccaagcaaaaagtgggagacacagtccatgattcagtacattcccttttagggtccctgtgctgtgaatctcataattgctccagattgtggctgtgctgtcctcctgggtctcagaggggggacgatgcagaattgagtccctccccaggatccaagacagatacgaatgttagaaagaaataaccctttgttattttgaaccaggacgatgtggtgctgcttatgacccactgcgtcaacaagcttattctgactggcaggaagagctatttggcaacatctacaggaatttagaatgttaatacctaagactatgtaattgcatttttatgatttttacacaatttctttttttttaattttactttaagttctgggatacatgtgcagaacgtgcaggtttgttatatgggtatacatgtgccattgtggtttgctgcacctatcaacccatcatctaggttttaagccccgcatgcattaggtatttgtcctaatgctctccctccccttgcccccgaactcccaacagaccccggtgtgtgatgttcctctccctgtgtccatgtgttattgttcaaccccgacttatgagtgagaacacgtggtgtctggttttctgctcctgtgttagcttactgagaatgatgacttccagattcatccatgtccctacagaggacatgaattcattcttttttattgctgcatagtattccatgatgcgtatgtgccatttacaccatggtgtatgtgtgccatttacacattttctttatccagtccatcactggtgggcatttgggttggttccaagttgcaatttattttacacaactttacttttacacacgtgcaaagtagtacatgagtgagcacgttcatgttgtgtagcaaacactggaaagaaccaagaatatatcaaccagattctctgtctgttttatgctttaatgattaataaatcataaaccatccagactgaggaagagtagacagcccataaagagaatagagcacattcctgtaaactgagaggaaatgtttctcaaaacattgcaaagtagaaaagcaagatgcaaaataagaatgtaccataatttatgtgtgtcatcttcaatttcttttattaatgctttatagtttccagcatacagatttttcaactcctcaaattcactcctaagtgttttttatgctattgtaactggatttttaaaatttctttttttgaatagttcattgttagtgtgcagaaacactactttttaaatattaattttgtggtgagagtgatcttctttgtcttgtctctggtcttagagaaaaagctttcagcttttcaccattgaatatgatgttagctgtgggcttgtcacatatggcctttattgtgttgacatacaatccttctaaacctattagagagtttttatcatgaaagaaccttgaattttgtcaaatgctttctctgcatccgttaagatggtcatgtgttttgtgcccttcattctgttaatatagtgtattacacttattgatttgtatgtgttgagacttccttgcacccaggggtaaatcccacttgatcttttgcaacataggtgaacctggaagacactatgccaagtgaaataagtcaggcacagaaagacaaatactgcatgacctgacttatatgtggaatctaaaaaacttgaactcatagaagtacagagtaaaaatggtggctaccagagactggggtgggagaaatagaaaaagggaagatgttggtcataggatacaaggtctcagagagacaggaggaaagagttttagtgatctatagcacagcaagtgatgatagttaataataatgtactgcatatttcaaaattgctaaaagagtagaatttaaatgttcacaccacagaaaataagtatgcgaggtgatgaatgtgttaagtgacttgatttaatcattcaataatgcatacatatatcaaaacatcaggttgtactccataaatatattcaattattatttgccaattaaaaataaaataatttttaagagggaaatatttggaaaaaagaaattgccctgaagtacttcttgctcattgactgttttcaagtcacaacggaagttaagccacttcatgcactcatgaatctgtttgtccattcgtccatccatccatttgtctgtccatctgtctgtccgttcatccatctatttttctgtccatctgtctctccgttcatccatccacttgtctgtccatctgtccatccatccattcatccaaccatccatccgtctctccatctgtctgtccatttgtctgtccatctgtctgtccattcatttgtccacccatctgtccattcatccatccatccatccatcctcctttcttcccttcctccattcaaccatgtctccatctctctattcatccattaaacataatgagataagtgttggataggttaccaaaaaagtgaaccccattctgtgttggttgtcttcgaaggttggctgagggatgtcacccagaaaccaagagatacttggagtaggaggtaaaagtgtatgtgtttgagagtcagccagagctgtgatacagctgtgctgctttcacaaagaagcttgagaccttggacaagtttcttaacctctctgagcctccaattcctcatctgtaaaatgtgcttaactaatcagtgtagtacaaagactcacatagcccacaactgaagtgaggttgctttttgacgaagtaaagcctttgctcccgtctttcccaggcatttcaaggcctggcttccacccaaggggcagtccctacaggagactggaggaagaagggaaaggcctcggctctctccctattggccaccatggcctggctgctgcccagacggtctcagctcctgctggttgcactctccacaccatcgtccctgcctctactccagatatggtgccaggaatcatggagtgtttgctcttcctggaagcagactcctgtcctattccttgtgagtcctctacaccaggctaacagtctctagcagaatctctcgaggctaccctgatttgagtgttccaggtatgttcagctgaaccctgattgagagaactcatatgtcagtcccagtgctgtgacttggagttacagagttgagaaacaaacagactgccacttcaccctgttcaaggttctctagctcacaggagaaacataaatacaaaagaaaactgcacccaaaactcccaggtgccacgacagaaatatggattcagatctgtggcaccatagaatgaacaggtaccttgcaggcatgaatgtgggtgagagtcatcagggaaggcttccgagagaaggtgacactctatgtgagtcttggagggtgaatacaaactcccttgtaggacaaggtgagaacattcatctcccggaaaatacaccattcaaacacatgaaagtacatgagtttgctacaggaatggtagtttgctcagatgcttgggacccatattggagataagagcagcaggggagaggactgaagtgatttaatgactggtatcaaattgctcacttttaaattttgtcaatcaaaggcatgtcttttaagtggccatctgttatcactcaccaccaggatataatcatataatcttggaataaagaaaagtcctttgtagcaaataaatttaggagggtgtgtgtgtccgtgtgcatacgctacctgcgtgtgtgtgtgtatatacacacatatatatacacacacgcatgtatgtgtatatatatgcatatatgtgtatacacacacacacacacacacacacacacacacacacactacctgtccttgtttttcttttctcattttgcagcagtctaggaacaagtccattggctgacatttgaaaaccactgatctcacctgatcctcttattctacccacagggaagcatgtcattttttaaaaattcattttttaaaatgagttcaattctcttaagtgtttattgctagccctttgactgctcctcacaaacagacccctgaccagccttaggcacttccaggtacttgggttcagacaacacttggtcctaacaccacagggaaaagcattaaagttctcggattactttttctgcaggtcatttgataatactttccactcctagtgaatgctacaacaagcaatatatattggtaattgcagccatctaagaatagacatatttgcaggaataatgacctcctcctccccctaaaaaaaagttagatttaagtaatactgccagttggtggccatttgtgcactcatgtctggttgcatttgcctccagggacagataaatagtaaaggagaaaactgaagtggggagggtctgagtaaatcagtctctctgcctctggctctctctctctctctctttcacacacatacacacacacacacacacacacatctgttattttaaatgtgttatgagtactttcttggtctgggaacccacggactggttcctaggatgctgcaaaatgagaaaaacatggacaggtagtgcatagataggtagattaaaaaggtggggggctgttcagggaccaaggttaagtgtgaacaaagcaacttccgtggagttctattatccatggcagggaggtgctagtgtcatcacagaaggtgaaaattcctgtctgaatgacctttggaagcttccagcagatgttggaaaagattttgcttcttcactaaattgccagaatgttagtttgtatttagaagtcactttgtacagaaaatacaaagattcaaatataagagtcaccctcacctaagccaagggctcacactctgagagggctgtgctgattgagactgaaagagggaaagggagggttgcccttcatcctgcactagttttggggtgcctgggctgagtggagtcatgggtgaaattgctctttctttaagctgctttcattccacctctctccccctgtttcttctcccatgcccccatgccaaagaagagggagttaccttctatcctgacagcatctccttcagagagggttgccttgatgagaaaggcaaagtaatctgatagagccagaaatacccaaggacaagacctcaaccaagagaaggaagaggaggaagaaggggaagtggaggaggaggaggaggaggaggaaggagaaggggaagaagggggaaagaaggagaaataggaggaggagtaggaagaagggggagtgaaggaggaagagctactgcctagtcagtagaagcctggctgttggggccgcagggcaatagtgactgcctcctcacccacccagcccaattatagctgcagtgcctgacagggaaagtctaacccatgctgtccttgagaactgaaccctgaaacatggctgcatgtttgaaacttatcacaagtcttgggatgcttgcagcttcgagccacattatttttaataaattcatttttgaagatttccctgccatggcaaggagggcacatctttgaaagccagaggatctaaattcaagcctaaattgtattctggtctgccataaggccttgtccaagcctgtgccttgcccaggccacggtttcatgctgctgtattgccttaatcagggagctttctcttgccctatgcagctccaaccactgtgaattcttctggaaggttcttgttggttagtgttagtgtaatgccaggccctgaccgtcacccagggtatggccagaacattgagaatgtttgcaatgtgcatgtatagaggcagaaggacaaacattacaaccttttggggaaaactttgagatgccagagatcaacaaagggccagagactggatcatgatatagttcttcagaattaaggctcagctgggcatggtggctcatgcctataatcccagtactctgggaggccaaggagggcagatcacacgaagccaggagttcaagatcagcctgggcaacatagtaagattccatctctactaaaaacagaaaaattagctgggtgtggtggtgtgtgcccatagtcccagctatttgggaggctggggcatgagaatcacttgaacctgggagatggagtttgcagtgagctgagatcatgccactggactccagtctggatgacagagcaagacaaagaaaaagaagaagaagaagaagaggaagaagagaagaagaaggaggaggaggaggaggagaaaaataaagcttaggctggggaagtgccttagctgtctacactagaaattagactatccggaaaactgaacatttattcttcccttctgtagatgctacatggatgaagcccatgacttgaagaatgagcctaggactatagtcttgcaccctccaggaagccttcattcctgctttcagtctgccccaggattcctgcataggtttctaagccatttatatccaagtttgcattggccaaatctcatgactgagtctcacctctcagtgtgtcagagtcaccagcctctttacttgagcttctgacatcccagacaggcccttttcttgcagtcttggcacatgtccaaaccactcccccagaggtgtctgcttggtttatacttcaccaccttcaggcctttcttaaatttttcttctccataaaagatttgaaatcattctgacactctctatccctatctattttcctcacagtttcccttcattttctccttaaaatctaacactagagtgatgtcagcaacaatggtagagtaagaacctctgaaaattctctccttcataaaaggaataagaaagcttacaaaaattgtcagtgtccatttttttcagaactcttagaattaaccaagggcttgcaacaacctagggagcatttattcaataaaaatggctgtatgtcagtaaaaacagtgagctttatggcatgttaacttgccttattcccatgccctgctttccaacccagtgataaccttgaaaaatcacagcccacactcccagtgcagtctggcagtcacaggaagaagaaaaagagatctggagctctttcaaggtctggttccgaaaatttaccaatatctgacctgtctgaaagttgacctgaagaccacatttgcaaagctgtttgtacttaacctgacttgaagcttgatcagactaaaaagtttcctcttcaggggatgtttgttgaaaacaatttagaggcaaatgtcttaactttacagctagctgaagtgcttgcttcaaaggtggataagaactggtaaacaatagactaaacaaaagttttataaggacaaactgaggaataaggtgttcataggggctttgaaaacctctgacatattcctggcaaactagaagaccacacaaatgcccagggctgtgcacatgcttaggaaggagttgaaaagaccctaataacttacctttagtgattaagaggtgctgaacaagcaggaagtgaaggaaggaaggcagagttgctaaatgcctaactatatgtttaagacatacatcaacacacagagctccttgcaacagactggaaggcttactagttccagatatttaagttaatctctgtccagtaattagctaaccactacttcagtggtcacacacaacagagaacgcagactttacagaatttgttcagaaagtcactaaacaaataacaaattcaacaagcagcaaccacaacaaatcctgaagaagggggaaatctgattgacagagttgtcatgttattttatccagttttcaacaacaacaacaaaattacaagacatgtgaagaaataagaatttcggtccatatacaggaaaaaaaaaacaatcaacagaaactgtcccaggacatcagacttaagataaacacttaagacaaagacaaagtcacctattttaagtatttaaattttttaaaaagccaagaaaatcatgtctaaacaattaaaagaaagtctgagaataatgtctcaccaaatagagaatatcaatttatagaaagtatttaaaaatgaaccgaatgtaaaatttaaaagaactataactggagcttaaaagtataactaaataaaaaataacacagcagatttgagcaggctgaaagaatagtcagcaaacttgaagatagatcaattgagatcacctagtctgaggaatagaaagcaaaaacaattaggaatgaacacatccttagaggcctgtgtggcatcctcaagagtatcaacatatgcataatgagaatcccagaaggagagaagaaagaaaaagggaaaaaataaatatttaaagaaataagaacaaaaacttcctaaatttgatggaacttttaatgtacacatccaagaaactgaacaaactccaaacagaataaattcaaatggactcacacctaagcacagcctcatgaacttgtcaaaagacaaagaaaaaaatattgaaagtgagagaaaagttactttgaacaaagaacaaagaattctcaataaaatttacagctaatttctcatcagaaaccaaggaggccagaaggcagccagatggcacattaaaagtgctggaaggaaaaaaaaactgtcaagcaagcattctatatccagtaacatcatccctcaaaaatgacggagaaatttagacatacccagaataattgtatgttgataaattagaaaacctggatgaaatgaacaaatgtttagcaatacacaaactaccaaaactgacttgaaaagaaataaaaaatctgagagacctctaacaagtcaacagatttaattaataggcaaaacccttccgacagagaaaattctaggaccagatggctttactggtgaattctgccaaatatttaaagaagaactaacaccaatcacttataaactatccaaaaatagaagagtaggaaacactttctaactttttctgagtctagtatcactctgataccaacacagacaaagacatcataagaaaagtatagaccaatatcctttatgagaagatatgcaaaatcctcaacaaaataccagcaaataaaaatctaaaagcatataaaaatagtcatacagaaggactctgataagatagaagagtaggaatcaccagaaatatctctccacctagacaacaattgcactggcagaaaccatctgatataatgattttggacctctggagtctattgcaggctttcaatttccaggggaagctaaatgaactccaaataatattaactcaaagaaattcatacatatacctattataatcaaactgttgaaagctaaccacatcagaaactttggagaccagaagacaatgagctgatatattcaaagcaataaaagggaagactctcaaccaagaatcctataaccagcaaaatggtccttcaaaagtgaaagagaaattaagacattcccagatgaccaaagctgatggaatttgttaccacttggcctgcccttcaagagatgcttgaaaggaatcctacaggttgaaataaaaggacagtaggcagtaagttaaagctatattaaaaaaaataaaggtctcagtaaaagtaaatgtatgggcattttaaaaactagcatcattgtaatatacagtacattactgctaaaatagatttttaacatttccaccacaaaaaatgacaaattgatgaagtgatgagtatgttaattagctcgattgagtctataatgtacacatggataaaaacatcgcattctatttcataaatatacactattatttgtccttttaaaatgaataaataaataaactagtattgtacaatggtgtataacttcgatttttgttttctatgtgatttaagagaataatgcatttttaaaagaacaattgttagctcaaaagccaatattattgtaacttcggtttgtaatttcacatttttttctacataatttaagggtctagtgcatagaaaaataagcttatgttttaggatgcacaatgtgcaaagatgtatttttgtgacattaatgactgaaaggggtggagatggagctgttaatagagcagtttttatatgtcattgaagttaagctagtttaaattcatattagagtgttatcacttagaatgttaaatataatcaccatggtaaccataaaaagtagtcaaagaacatatacaaaaggaaatgtgaaagaaatttaaacactttactacaaaagctcactaaacccaaaggagaacagtaatgtaggaagtgagagacaaaaactataaggtacatagaaaacaaatagcaaaatgacaaaagtaaggccctccttacaagcaattacttaaatgaaaatgcattaagctctccaatcaaaagatatgaatgcacaaaggacaaaaataaaaatgatccaagcatatgctgtctacaagagtctaactttagatacaaaggcacaaattgattgaaaatgagacatcagaagaaaaggatggaaaaggatatttcatgcaaacagtaaccaaaagagagcaggaatggctatactaataaaaagcagaataaacttttaagcaaaaagtttacaagagactaggaaaatattatatactaataaaagattaaatataccaagaagatataataattataaatatttgcacacctaataacagaccataaaaatatgtaaagtaaaatttgacagaattgaatggggaataaaatgttctacagtaatatttggagacttttatacctcattcttaataatggatagaacaaactgatagaagataaataatagaagacttaacacaataagccaactagatctatatagagtactttacccaacagcagcagaacacataatctttacaagagcatatggaacaatttcaaggatagaccatatgttagggcatgaattaagtctcaatatatttttaaagacagaaatcatataactatcttctcaaaccacaacagaataaatgtagaaatcagtaacagaaaaaaaactgaaaaattcacaaatttgtggaaatttaaaaactactcttaaacaactaatggatcaaagaagaaatcaaaagagaaattagaaaatacttagagatgaatgataatgaaaaaagaacatactaaaacttatggggcataataaaacagtattaaagggaaaatttatcattataaatgtttacattaaaaaacaagaaagatctaaaattaataacctaattttacaacctaaggaacacaagaaaatgaacaaactaaacccaaagctagcagagagaaggaaataataaagattagagcagagataaaggaaatagtgaatagaaaaacaatgaagaaaatcaacaaaaccagaagtttgttattttaaaagatcaacaaaactgacaaaattttagctagatgtactaagtaaaaaagtgagaagactcaaattactgaaattataaatgaaagtagggacattacccataatactgtacaaataaaaaggattagaagagaatattattaacaattgtaccaaataaacttgataacctagataaaatggacactttcccagaaacacaaaagttatgaagaaatagaaaatctaaatagacctgtaactaatcaggcgattggatcagtaataaaaaatctcccaacaaagaaaagtcctggacttaatgacttcacctatgagtcctatcaaacatttaaagaactaacacaatccatcttaaactctttcaaaaaattgaagatgaaaaacacttcctaactcattgtatgaggacagcattacttttatacaaaatccaaacaaagacactggaagaaataaaaactgcagaccaatatcccttatgaacattcatgcaaaaatcctcaacaaaatgctaacaaactgagttcagcagcatattaaaagggttatacatcattatcaagtggaattttttcctggaatgcaaggatggtttaacatacaaaaatctatcaatgtaatacagcacataaagagaatgaaagaaaaaacctgcaagtctatctaaaccgatgcagaaaaaaacctttgacaaaatttaacgctctttcatgataaaaatactcaacaaatcaggaatagaaagaacttacctcaacataataaaatgcttatatgaaaaatacacaacaaacattgtgctcatggtacaagactgaaagtgcttcctttaaagtcaggaacaaggcaaagatacctattttcagcacttctcttcaccatagtattacaagtcttagtcataaaaattaggctgcaaaaaaaaagacattcaatttggaaaagaagtaaaaacatctctatttggagctgatataatctaatatgtagaaaactctaaaaattacacacacatacacacacactcacatacaaaaaatctgtaagaactaataaatgaatttagcaaagtaacaggatacaaagtgaacatacaaaagttagctgcatttctatacacaaacaatgaacaatccaaaagagaaattaagaaaataattccatttacagtagccctacctaatactcaatataaaaattaactaataatgaatttatgactgaaatgtaacatttaaaactataaaactcttaggaaaaaaacacagggcaaaagccccttgacatcaaatttggcaatgatttcttagatatgaaaacaaagacacaacaaaagaaaaatagataaattggattccataaattttttaaattatgcatcaaaagatgctattaacaaagtagaaaggcaattcacaagatagaagaaaatatttgcaaatcacatatctgataagggattaatagccacagtatatagagaacttctaaaacacaacagcaaaaaaaaaaacctgattcaaacatctgcaaaggacttaaatagatattttatcaaagaagatatataaatggcaaataatcacatgagaaagggctcaccatactaatcattagtgaaatgtaaatcaaaattacaatgagataccacctcatatccattaggatggctactataaaaaaaagcattaatgaggatgtggaaaattgagacatttgtgcactgttagagggaatgtaaaatggcacagttactcttgaaaagagtatagcagttcctcaaggaattaaaactagaattaccatatgacccaacaattctatttctggggatatactcaaaataattgaaagcagtatctctaagacatatttatacacccatgcctatagcagcattattcataaaagctaaaacatgggaacaactcaaatgtccatcaacagatgaataaaaaaatgtggtatacacatacagtagaatattattcagccttaaaaagaaaggaaattctgacacataccacatggatgaaccttgaggaaattatcataaatgaaataagccaggtacaaaaagacaaatgctatattattctacttataggaagtattcaaatttatggagatggaaatagaatagtggtttccaggggaaggtgtaaaggggatggagagttattatttaatgtgtatagagttccagtttcacaagttgaggagagtcctggagatgaatggtggtgatcattctacaacaatatgaatatagttaataccactgaactgtacacttaaaaatggttaagacagttaattttatcttacaagtattttactgacaagatttttaaaaggatcccacaccattaataagtaggatttatctcaggaatataaggttagttcaatatagaaaaaccagtcaaagcaaaacaacatattaatagaataaagggaaaaattgcatgtttatctcaacatacacagaaaaagcatttgacaaaatccaaaactctttaataataaaaacactcaacaaaataaaacaaagggaacttcctcaacctaatgaagggcatctataaaaggttatttaaggttgtagggggtggttccaagatggccatataggaacagctccagtctacagctcccagtgtgagcaacgcagaagatgaatgatttctgcatttccaactgaggtactgggttcatctcactggggactgccagacagtgggtgcagaacagtgggtgcagtgcactgagcatgagccaaagcagggcgaggtatcacctcacccaggaagtgcaaggggtcagggaattccctttcctagccaaggaaaggggtgacagactgcacctggaaaatcgggtcactcccaccctaatactgtgcttttccaatggtcttaggaaacggcacaccaggagattagatcccgtgcctggctcggaaggtcctacacccacggagccttgctcattgctagcacagcagtctgggatcaaactgcaaggtggcagtgaggctaggggaggggcacccaccattgctgaggcttgagtaggtaaacaaagcggccaggaagctcaaactgggtggagcccaccacaactcaaggaggcctgcctgcctctgtagactccacctctgggggcagggcatagccaaaaaaaaggcaggagaaacctctgcagccttaaatgtccctgtctgacagctttgaagacagtagtggttctcccagcatgcagcttgagatctgagaacggacagactgcctcctcaagtggttccctaacccctgagtagcctaactgggaggcacaccagagtaggggcagagtgacacctcacatggccgggtactcctctgagacaaaacttccagaggaacgatcaggcagcaacatttgctgttcagcaatattcactgttctgcagcctccactgctgatatccaggaaaacagggtctggagtggacctccagcaaactccaacagacctgcagctgagggtcctgactgttagaaggaaaactaacaaacagaaaggacatccacaccaaaaccccatctgtacgtcaccatcatcaaagaccaaaggtagataaaaacgcaaagatggggaaaaaaacagagcagaaaaactggaaattctaaaaatcagagcacctcccctcctccaaaggaaagcagctcctcactagcaatggaacaaagctggacggagaatgactttgatgagttgagagaagaaggcttcagatgatcaaacttctccaaactaaaagaggaagtttgaatccatggcaaagaagttaaaaaccttgaaaaaagattagacgaatggctaactagaataaccaatgcagagaagtccttaaaggacctgatggagctgaaaaccatggcacaagagctacatgacgaatgcacaagcttcagtagctgattcaatcaactagaagaaaggttatcagtgatggaagatcaagtgaatgaaatgaagtgagaagagaagtttagagaaaagagaatttaaaaaatgaacaaagcctccacgaaatatgggactatgtgaaaagaacaaatctacgtctgattggtgtacctgaaagtgacggggagaatggaaccaagttggaaaacactcttcaggatattatccaggagaacttccttaatctagcaacacaggccaacattcaaattcaggaaatacagagaacaccacaaagatactcctcgagaagagcaacaccaagacacataattgtcagattcactaaagttgaaatgaaggaaaaaaatgttaagggcagccagagagaaaggtcaggttacccacaaagggaagcccaccagactaacagcagatctcttggcagaaactctacaagccagaagagagtggggaccaatatgcaacattcttaaagaaaagaattttcaacccagaatttcatatccagccaaactaagcttcataagtgaaggagaaatgaaatcctttacagacaagcaaatgctgagagattttgtcaccaccaggtctgccctacaagagctcctgaaggaagcactaagcatggaaaggaacaaccggtaccagccactgcaaaaacataccaaattgtaaagaccatcaatgctaggaagaaactgcatcaactaatgagcaaaataaccagctaacatcataatgacaggatcaaattcacacataacaatattaaccctaaaggtaaatggactaaatgctccaattaaaagacacagactggcaaattggataaagagtcaagacccatcagtgtgctgtattcaggaaacccatcccacgttcagagacacacataggctcaaaataaagggatggaggaagatctaccaagcaaatggaaaacaaaaaaaggcaggggttgcaatccaagtatctgataaaacagactttcaaccaacaaagacaaaagagacaaagggatcaattcaacaagaagagctaactatcctaaatatatatgcacccaatacaggagcacctagattcataaagcaagtccttagagatctatgaagagtcttagactcccacacaataatgatgggagactttaacaccccactgtcaacattagacagatcaacgagacagaaagttaacaaggatatccaggaattgaactcagctctgcaccaagcagacctaatagacatctacagaactctccatcccaaatcaacagaatatacatttttcttagcactacaccatacttattccaaaattgagcacatagttggaagtaaagcactcctcagcaaatgtaaaagaagagaaattataacaaactgtctctcagaccacagtgcaaccaaactagaactcaggattaagaaactcactcaaaaccactcaactacatggaaactgaacagcctgctcctgaatgactactgggtacataatgaaatgaaggcagaaataaagatgttctttgaaaccaacgagaacaaagacacaacataccagaatctctgggacacatttaaagctgtgtgtagagggaaatttatagcactaaatgcccacaagagaaagcaggaaagatctaaaattgacaccctaatatcacaattaaaagaactagagaagcaagagcaatcacattcaaaagctagcagaaggcaagaaataactaagatcagagcagaagtgaaggagatagagacacaaaaaaaaccttcaaaaaaatcaatgaatccaggaggtggttttttgaaaagatcaacaaaattgatagaccactagcaagactaataagaaaagagagaagaatcaaatggacacaacaaaaaatgataaaggggatatcaccaccaatcccacagaaatacaaactaccatcagagaatactataaacatctctaaacaaataaacttgaaaatctagaagaaatggataaattcctcgacacatacacctttccaagactaaaccaggaagaagttgaatatctgaatagaccaataacaggctctgaaattgaggcaacaattaatagcttaccaaccaaaaaaagtccaggaccagatggattcacagctgaattctaccagaggcacaaggaggagctggtaccattccttctgaaactattccaatcaatagaaaaagagggaatcctccctaactcattttatgaggccagcatcatcctgataccaaagcctggcagagacacaataaaaaaggaaaattttagaccaatatccctgatgaacattgaagcaaaaattctcaataaaatactggcaaaccgaatccagcagcacatcaaaaagcttatccaccatgatcaagtgggcttcatccctgggatgcaaggctggttcaacatatgcaaatcaataaacgtaatccagcatataaacagaaccaatgacaaaaaccacatgattatctcaatagatgcagaaaaggcctctgacaaaattcaacaactcttcatgctaaaaactctcaataaattaggtattgatggtacgtatttcaaaataataagagctatctatgacaaacccacagccaatatcatactgaatgggcaaaaactggaagcattccctttgaaaactggcacaagacagggatgccccctctcaccactcctattcaacatagtgttggaagttctggccagagcaatcaggcaggagaaggaaataaaggatattcaattaggaaaagaggaagtcaaattgtccctgtttgcagacgacatgattgtatatctagaaaaccccattgtctctgcccaaaatctcctgaagctgataagcaacttcagcagtctcaggatacaaaatcaatgtgcaaaaataacaagtattcttatacacagataacagacaaacagagagccaaataatgagtgaactcccattcacaattgcttcaaagagaataaaatacctaggaatccaacttacaagggatgtgaaggacctcttcaaggagaactacaaaccactgctcaatgaaataaaagaggatacaaacaaatggaagaacattccaggctcatgggtaggaagaatcaatatcatgaaaatggccatactgtccaaggtaatttatagattcaatgccatccccatcaagctaccaatgactttcttcacagaattggaaaaaactactttaaagttcatatggaaccaaaaaagagaccgcattgccaagtcaatcctaagccaaaagaacaaagctggaggcatcatgctacctgacttcaaactgtactacaaggctacagtaaacaaaacagcatgatactggtaccaaaacagagatatagaccaacggaacaaagcagaggcctcagagactatgccatatatatacaactatctgatctttgacaaacctgacaaaaacaagaaatggggaaaggattccctatttaataaatggtgctgggaaaactggctagccatatgtagaaagctgaaactggatcccttccttacatcttatacaaaaattaattcaagatggattaaacacttaaatgttagacctaaaaccataaaaaccctagaagaaaacctaggcaatactattcaggacataggcatgggcaaggacatcatgtctaaaacacaaaaagcaatggcaacaaaacccaaaattgacaaatgggatctagttaaaataaagagcttcttcacagcaaaagaaactaccatcagagtgaacaggcaacctacagaatgggagaaaatttttgcagtctactcatctgacaaagggctaatatccagaatctacaaagaactcaaacaaatttacaagaaaaaacaaacaaccccatcaacaagtgggcgaaggacatgaacagactcctctcaaaagaagacatttatgcagccaaaggacacatgaaaaaatgctcatcatcactggccatcagagaaatgcaaatcaaaaccacaatgagacaccatttcccaccagttagaatggtgatcattaaaaagtcagggaacaacaggtgctggagaggatgtggagaaacaggaacacttttacactgttggtgggactgtaaactagttcaaccattgtagaagtcagtgtggtgattcctcagggatctagaactagaaataccatttgacccagccatccaattactgggtatatacccaaaggattataaatcatgctgctataaagacacatgcacacatatgtttattgtggcactattcgcaatagcaaagacttggaaccaacccaaatgtccaacaatgttagactggattaagaaaatgtggcacatatacaccatggaatactatgcagccataaaaaatgatgagttcatgtcctttgtagggacatggattaagctggaaaccatcattctcagcaaactatcacaaggacaaaaaaccaaacaccacatgttctcactcataggtgggaattgaacaatgagaacacatggacacatgaaggggaacatcacacaccggggcctgttatggggtgggaggaggggggagggatagcattaggagatatacctaatgtaaatgacaagttgatgggtgcagcacaccaacatggcacatgtatacatatgtaataaacctgcatgttgtgcacatgtaccctaaaacttaaagtataatttaaaaaaaaaagtttgcactggaagttctagccagggcaattagccaagaaaataaattttaaaacataaagattgtaaaggaagaattaaaactatatccatttataggtgacgtgtgtgtgtgtgtgtgtgtgtgtgtgtgtgtgtgtgtattgggaacaactaaggaatatgtatagggaatatatttagggaatatttatatatatatataaatcatatatatatatgttatgtatataacttgtgtgtatgtgtttgtgtgttccttaggaattccatatatatatatacacacacacacacacacacaaatataaacacacacacatatatataccacttatatataagttaaaatatatgtggaatttaacaaatatataagatagatagatagatagacagacagacagatatatatggagttcctaaataatacacacatatatacacacaaataaaactattagagttaatatatgaattcagcaagtttgcagggtgatatggtttggctttgtgtccccacccaaatctcatctcgaattgtaatccccatgtgtcatggaagggacctgatgggaggtgactggatcatggtgcggtttcccacatgctgttcttttgatagtgagtgagttctcatgagatctgatgggtttaaagtgtttggcagctccccccaccccctctctctcctacagctttgtgaagaagattcttgcttctccttcaccttacgccatgattttaagtttcttgaggacccccccaagccatgcagaactgtgagttaattaatcctcttctctttataaattacccagtctcaggtagtttttttatagcagtgtgaaaaaggactaatacatggggtatgagatcaatatacaaaaatcagttgtatttctatgtgctatcaataaacaattgataagtgaaattaagaaaacaatgcaatttatctcagcatcagaaagaaaaaaatgcttaggaacaaatttaacagaagacgtataagacttatacactgataactacaaaacattgttgaaagatttaaatatctaaaaaattgaaagacatcctgtgttcatagattatgagaccttgtattgttaagacaccaagctgatctgcaaattcaatgtaatctgtatgaaaattacaactgcttttttaagaagttgaatcctaaaatttatataaaaaggcaagggattcaaaatagtcaaacaatcttgaaaagaaaaacaaagttggagcactcacaattcccattttcaaagcttaacacaaagctagattaatcaagacagcatggtttgacatatagatcaaatgaatagaattgagagtccagaaataaacccatacatttatggtcaattgatttttaacaaggatgccaagacaatttaaagaattgtcaaagaatagtctttttaacaaatggtgtttggacaactagatatcaaaatgaaaagaatgagtttagacccctacagcatgccatataaaaatgaactcaaatttacatgtaagaagtaaaactatgaaattcttaggaggaaacatagttgcaaactttttacctttgatttggcaatggtttcttagatatgacacctaaattaaagcacaagcaagcaaagaaaaaaaaatagattagacttcatcaaaatttttttaaatggtgtgtcaaaggatgactctaccaagaatataaaaaagacaactcatcaaatgggagaaaatattaagcaaatgatatatattcccctctcccaagtgggcacaatatcagaagacaaaaatccccctgtgcccatggtgtctacatgaggaaaaaagaactagaggaggtcattcagcttccctggcacttgaatcctttctaggaagaccactgtggtcttacctcactggaggtaacagcatggctagacacccaagagtcaggtaaaaacaaagaaaggaaacagagttcatagtgaccagtgtgtagatattcgtcataactctgtgtttctcctagctttggtgccccattgaagataccagccaactgcatagcccactcacaaagctgaactggtcactttcagaagcatggtggaaagtttaacttggcctgagtccctagatgggtagactttacacccagattcaatgccaaccccaatactcccacccacgccaggagatgcctacctttccccattttagagaagcaaaggaactagatctgtttggcctgagagtccaagagtggctcagtttaaccaaaagcccatgtcacccaggcagtgagacgttcacctttgcccattttggagaagcgtagggactagacctgctcaacccaggagatcaaacagcagctcaactcaatcaaaatcttgcccctttgctttgcccaaataggtaggcaatcttcaactgtgcatttctaaagagcatagtctctgatcccacccgtcttgagcagcaccctcacctaacctcagagcccagcttgcagacttgtccagccacaaattccaaataacagaaccatccaacaaaggaatatatcctgcaaccagcctgacaagaggctattacagtacccagctaacagtttcaactaatagcaaagcccagcaactaatctctccagataggggaacccagatagaagccccaccaaacatcagagcaaagtttcccagccaactagtgaacccacaacaagctctgcctaccaggggttgtcactagctgctccttccagaattatagtctatactaaatattgaagatctagccccaccatagaacacataaggattatggaaaatcaaggaagttttgattgacaccttcagaaagtactaataaagatacaataatgaatcctaaagaaattgagatctataaaatgactggcaaagaatttagaataattatcttacagaagttcaatgaataacaaaaatgtatgggtaaaaaagttaagcaaaatttagaaaatacacaaagccagaattttcacaaataaataaaaacagtttaaaaaatagacattctagggatgaagaataaaatgcctggactgaaaatttcaatagaaaacttcaaagcaaatgaaatcaaccagaagaaagagtcattaagctcagagacaaaacatttgaaattatccagtcagaagatcaaaaagaataaagaataaaaaagaataaagaaagcctacaggaatcatggaataccatcaagagaccaaatctttatatagtaggattttcagaggagaaaaaaaaatagaaaaagggacagaaatcatatttttaaaaaacaatggccacatacctttttaatctgggcatagatcccaacattctagtacaagaaggtgtagaggtctccaatcaaatttaacccaaaaaggagttcaccaagacatataatcaatctatcaaaaatcaaagactaaaagttttgagatcagcaaaagataagaatcaggttgcttatgaaggagtgtcagcataactctttgcaaatatcttagcagaaaccctgcaggtcaggaaaaagtggaataatatattcaaaatgatgaaggaaaatacctgataaccacaaatactttacctagcaaagttgtctttcaaaaatgagggagaaataaaaacttccccaaatgaactaaagctaagggagtttataaccactaaaccttccttaacaggaattgctaaagggagttctttaagctgaaacaaatgaccactaattaataacatgcaaaagcacaaaattcaatggtattaaaaaatagaggcatattcagaatattcaagaactataattatggtgtgtaaagcaatcttattcttagtacaagggttagaagacaaaactgttaataactagtatagctgaaatgagtagacaagggatacacattacaaaatgatgtaatttctaacattggaaacaaaatgggtgggagaaataaaaatgtagagttgttttatgtaatcaaagttaagttgttatctgcttgaaataggctgctttaagtataagatgttctatgtaagccatatggtaaccacaaaacaaaaaatatttagtagaaacacaaaacaaaaattgaaagacttaacagtataccactacagaaaactatcaagccacaaagaaaaatagcaagagaggaagaaataaaatatcataaaacaaccagaaaacagttaacaaaatagtagtaagtccttatctattaataattaccttgaatgtaaatggactaagttatccaatgaaaagacggagtgactgaatggattttttaaaagacaagacacaactatacgctgcctaaaggaactcatctcacatagactgaaaatgaagggataaaaaatgattttatgcaaatggaaccaaaagagagcagggatagctacacttacatctgacaaaatagactttaagtcaaaaactgtaaaaatagacaaaaaacattatataatgataaatgagtcaattcaccaaaagggtacaaaaatgtaaacacatatgcacccaatattaggacaccaaatatataaaacaaatattaaaggatctgaaagaaaagatagagggcaatacaataatggagatttcaatatccactttcaacaatgaacagatcatccagacagaaaattaaaaagaaaacattggacttgaacagcacttttgacccatggacctaaaaggcatacacagaacattgcattcaatagcaaaagaacacacatttttctcaagccatacatggaatattctccaggatagatcacatgttagatcaaaaaaacagcccttagcatatttaagaagatgaaatcatgtgaagtactttatgaccacaataatataaaactagataacaaaaacagaaggaattttggaaaatttgcaaatacataaaaaataaacaacatgttcctgaataatcaactggtcagtgaaaaaaattaaaagagaaatttaaaaataccttgaaacaaatgaacatagatacacaacataccaaaacttatgggatacagcaaaagcagttatgaaagaaacagcaaaaaatgcctatatcaaaaaaagaagaaagattttaaataaacaacttgatattactctccaagttactagagaaaaactaatcccaaaattagaaaaaagaaggaaataataaaataataaaaatctgagcagaaataaatgacacagagacagaaaaaaatacaatcaaaaaagaaagaacttttttttgaaaaattaacaaaatcaacaaacctctagcttaactaagaaaaaaagggagaagactcaaataaataaaaccagaaatgaaagaaaagacattatatctgataccacagaaatgcaaagaatcataagaaactactatgaacaactatatgccaacaaattggataacctagaaaaaaaaagatacatttctagacacatgtaacctacaaagactgaatcatgaaggaataaaaaatctcaacagaccaataataagtaaggagattaaatcagtaataaagagtctcccatttgagaaaaagcccagggccttatgacttcatggatgaattctaccaaatattttaaaaaaaagagctaacatcaatctttttcaaatgctaccccccaaagaaatggagaagagggaatatttctcaactcttttttataaggccagcataaccctgacactaaatccagacgaggacattacaaggaaagtacaggccaatattcttgatgaacatagatgcaaaaatcatcaacaaaatactagcaaatcaaattcaacagcacattaaaatggtcactcaccatgatcaagtgggatttatcccttggttacaaagatggttcaatacatgcaaacctataaatgtaatacaccatattaacagaatgaaggacaaaaaccatatgatcatctcaatagatgcataaaaagaatttgacaaaattcagcattctttcatgattaaaaactgtcaagaaattacgtatagaggtaatgtgcctcagcacaataaaggctatatatgacaagcccacagctaacattatactcaatgttaaaaagttgaaaacatttcctctaagatctggaacaagagaattatgcccacttttactacttcaactcgactgagtattagaagttcccatcagaacaattgagcaagagaaagacgtaaaaggcattcaaataggaaaggacagagtaaaattgtcactatttgctggtgacattatcttatatatagaaaaccctaaagaccccaccaaaaaccttttagaactaataagcaaatacagtaaacttacaggatacaaattcaacattaaaaaatcaatagcattggccaggtgcagtggctcacacctgtaatcccagcactctgggaggccaaggtgggccgattgaggtcaggagatcgagacaatcctgcctaacatggtgaaacaccatctctactaaaaatacaaaaattagccaggagtggtggtgcatgcctgtagtcccagctactcaggaggctgaggcaggagaatcacttgaacccaggaagtggaggtggcagtgagccaagatcatgccactgcactctggcctgggctacagagggagactccgtctcaaaaaaaaaaaatattaatagcatttcagccaggtggggtggctcacacctgtaatcccaggactttgggaggcagattgcttgagatcaggagtttgagaccagcctgggcaacatagtgagacccccatctctactaaaaatacaaaaattagccgggtgtggtagtgtttgcctgaagtcccagctactcaggaggctgaggcacaagcatcacttgaacctgacaggtggaggttgcagtgagctgagattgcaccactgcactccagcctgggcaagagagtgaactcggtctcaaaaaaaaaaaaaaaaaaaaagaaagaaaagaaaagaaaaaaaagaaaaggaaaaaaaaagaaagaaaagaataagaaatcagtagcatttctatacactaaaaatgaactatccaaaaaaagagaaatcccatttacaataactacacacacacacacacacacacacacacacacgtaatacttagaaataatgttaactaaataggtcaaagacctttacactgagaacaaaacatttataaaacaaattaaataatatacaaataaatagaaagctattcagtgttcatagcttgaaagaattaataccataaaaatgtctattataccaaaagtgatctacaaattcatgcaatcctatcaaaattccaatgtcatttttcacagaatagaaaaaaaatcctaaaattttgtatgaaacaacagaaaaacccaaatagccaaagcaatcatcagcaaatagaacaaagctagaggcattacactacgtgattttaaattatactacaaagctatagtaactaaaacagcagggtactggcataaaaataaagacattgaccaatggaacaaaatagcccagaaataaatccatacatgtacagttaattaatttttggcaaaagtgccaagaatacaccatgggaaaaagatagtctcttcagaaaatagtgctaagaaaagtgtaagtctacatgcaaaagaattaaattggactcttttctgacaccatatatgcaaatcaactaaaaatggtctgaacacttaaatgtacactgaaaactgtaaaactgtaaaaagaaaatacaggggaaaaactgcataacattagtcttggtgacgattttttagatttggcccaaaaagcaaaaatagacaaataagattacaacaaacttaaaaatttctgcatagtgaaggaaacaattaacgatgtgaagagacagtctgcaaattgggagaaaatatttgcaatccatacactcaataaggagctaatattcaaagtgtgtaaggaattcaagcaactcagtaacaagaaaacaaataattcaatttaaaaatgagctgggtgcggtggctcacgcctgtaatcccagcactttgggagaacaaggtgggcagatcatgatgtcaagagattgagaccatcctggccaacatggtgaaacctcgtccctactaaaaatacaaaaattatctgggcatggtggcacgcgcctataaaaattagctaagcatggtggcgcgcacctatagtcccagctactcagggggctgaggcagaagaatcacttgaaccagggaggcggaggttacagtaagcccagatcacaccactgccctccagcctggcaacagagctagcgagactccgtctcaaaaaaaaaaaaaaaaaaatgagcaaggggactaaacacacatttctcaaaagatatacaaacggtcaaaaggtatttgaaaaaatattcaacttaagtaatcatcaggaaaatgcaatttaaaactacaatgagctatcatctcacaccagtcagaatggctattgtcaaaaagacaagcaataagaagtgttggtgaagatgtagagaaaagtaaacccttgtacactgttggtgggaatgtaaattagcatagtctttatggaaaactgtatgatgttcctttaaaaattactaataaagctgccatatgatccagcaatcccacttatgggtatttacccaaaagatttgaaatcagtttattgaagagacatctgcactctcattgttattgcagcactattcacaatagccaagatatggaatcatcccaagtgtccatcaatggatgaatgtgtaaagaaaatgtggtgcacttatacaatgaaatattattcatccataaaaaagaataaaattctatcatttgcagcaacattgcaggacctggagggtatatgctaagtgaaagaagccagacatggaaaaacaaatactacctgatctcacttacatgtggaatctaaaatgttaaagaagcagagaatggaatggtggttaccagggcctggggtaggagtaggggaatggaaagactttggtcataggatacaaaattccaagtagacaggaggaatacattcaggagatctattgtacagcaaggtaattatagttatataattatggagtataattatatactccataattgctaagcgaataagttgattttaaattttctcaccacaaaaaaataagtatgggaagtaatgaacatgttaattagcttgatttagtcattccataatggatacatatctctaaacatcaattgaaaaataaacacgtaaatagtaaaatagaaataagttaatccacacatgcacaccacatttcacctggcagttctacttaatctattatataacgtgcatcatctaatatcttaaacaatgtgccacatctaatatgttatacaatgtgcttctttatctcactgtgcttttcccactaaaatgtaagcttgacaaaggcaaggatttttacctttttttccctgttgtgtctctggccactcttacagttgggcactaaataaatattgaatgaataagtggatggagagagggaaggaagagaggaaggagggaggaaaagaagggagggaggacgagagaaagaaaggagaaggaagaaagataaagaaaggagggatagaggaaaggagatgagagtgttatgtgctcctgagtatgaggatgacgatacgacatctcgtgtttgggtactgagttggattttaaaatcgcatggtgcagtagcacatagcaaacattcaaagactgtgtgctgccttaatgaacaagcttccttaacttgcgtcttccacttcccttaattactgcaacctcctctttttcctccaaccagagaaggtctgtaatggaattcttgtgccttcagggggccacaggacaaaatctgcagctggaggatcacttcctatctctacttcctcctggcagaaggcagagcaagccccctgagcattccaagcccctgctccgatgtaccttgtcagggttaaaagcacagcaggttggtgtgtgcggagaccggtaaataagaaacaatggctttggtgtttggaatgtagaaaagctgctcaaatcgctcaggtgggtgctctatgaaagtaaacttccattggttccagttttatttcatcttgcctgtaagtgcgaagattgtttacagaggcatgcccaccgtcctaggcccatagtaggaccaaaatgttgatgctgaacatttttgttttctatgtttgctttaactggggagtcacaagttcaaacagccacaggaaccaatcctggggtgaagagtaggctgtgttggggactgtggtaaactagacggctcatgctgacacccagttccactgagggtggccacggatgtagggttgccagagttgtcacatctccatctctctctctctctctttctctctctctcattctctctttctctctcattctcattcttcctctatcattctctctcattctctgtctcattctctttctctcattctctctctcattctctgtctcattctctttctctcattctctctctcattctctgtctttctcattctttctttctcattctctctcagtctctgtctcattcttttctcccattctttctctctcccattctctccttctctctctcattctcattttctccttttctctctctcattctctctctctcgcattcactctttctctcagtctcagtctcattctcactctcattctccctttctctccctcattctctcttttttctcattctctctcattctctctcactgtcattctctctttatcattctttcattcactctcctctctcattctctctctcagtctctgtctcattctctctcattctctcttcctctctctcattctttctccccaagataagctgaatgtctgaattttctgtgaaatgtaatttttaaatgctagaaaatgacctgatttgctttgaaacacctatatttagattctgtattgttcatttatttatgtatacagtacagagttgtgcaagcatcaccagaatctaattttgagtacatttatatcatttcagtaagaaatagtgtgccccttagtggtcaccccttcatttttctcctgtcccccaccaagcctagacaatattttctgtctgtatagatttgcctattctggacgtttcatataaatgaaataataccaaacatggtcttttgtgactggcttctttcacttggtgtagtgtttcgggagttatctttgttttggcctatatcagaactctatttctttttgttggtggtggtaaataatattctattgtatggctacatgacattctgtctgtttattcattagccatcaaacaagcatatcacaggctggtcccagccctgggggacccatttttcaccatgcaacagcctcctggctggtgtccccatctcctgttcaatccccctgccctctgctgacacagggtgtgcatgcaaccagccagacagcccagggtagaaatattgggacaatttttctaaaccaaggctttgagcatgtcactctcctccatccccacctttatgctgaaatcaccctcctctcttggcttcagagtggagctccagccccttagtccaaaacaaaaacttttgcaagagctggccccaccaccctccacacccttccctgctcacaaaccctgtgctccaacacaccatgtcaccctctcctctcaaagcctgagcatgtccagtcctctgtccccttgctcatgctgtgccactggtgtgtaattcaccaattgtgggtcattctcctccactgagtggggaactgttctggaaggagaaggggtattctctgtcctcaggacttgggacaaagcaggtacataatgaatgtctgacggtggaatagacacaggccattcctccatctaaaatgcccttccctacattgtccatctcacatttgacagcagctctccttgctcacccacacctgatccaagcactgattatctagttcgtctctgtgctcatgcagcacctagctctgtgtgtgcgtgcatgtacgtatgtgtgtgcgagcgtttgcgtgacttcatcagatttcagtccttggggacaagcttttccccatattgttaaaaattcagtctgtgcaataatttgttgaggcctaatttgcatgcactgagatgcaaccatttaagtgtatagtttgatgtgtttcaagaaatgttcacctgtggattatactcatgtagccacagctgccatcaaaatatagaacatccccatcaccccagaaagctcttctgtgccccttccaggtcaatgccctcacgccccatccaaggcaaccactgatctctcctgacaccacagctcagcgtttgcggctgtggggcttcataggcacggactgaggcagcagacaatcttgcgtgtctgtcttcatttgcgcggcgcagcatctgtgagattcagccatgcagtcgggtctgtcgtgaattcactctttttgccccattcccagcacagtgcctgagtgtcaaattgaatagacttcaattgctgtgaggtgattaatagcaaattgtgtgttattcatgaataaagaaaaaagatgcaacgtgttctgggaggtggaaaagagaaagaaacccaccccgaccccgcctttctgttctcacctaacgaagtctggagttcagcaagaaaaggtgtgagggggtttttcaggaaacagataggccaccagggtccaaatcagaggtagagtggcacatccagcccaaatggaaacaaacgatgcaagcctatggcttaaatcagaaattaatctctactggtagtttccatgaactcttctccaggtaaacatcacatgtaaaagtaagttcctgtcattatagaataattagattataagaactaaatttatagtgtatactacgcattactgcagaattgtagaaattatgcaacccagtccttaacagaattaaatgggaatctatattttttctcagtaagtctttattgaatgaatggagtcatattctgtttgtgtttttctgtgcttttgcaatttctcaaattaaagataaataaacggtctcttcttggcctcgtggctaagatcaagtgtaaagacaagtaaatggtagttgaatgaaagaaaccaggaaaagttatttttggagtgtgtagggtgtgcctcgcctccttggacccacctcgtttctcccaagagcagacccagatacactaactcgatctgcctcccgcctcctccttctgctttaatcaactgtgggtcctgctctcttcaatgcctgcgtgtcagctaagtttgcaatcaccccgtttacagcttgaaaatgaagccctgtcttttctgcaagtaagaatcttcctgaaccatgcatccaaatgtcacatttccaaacatgttgtgagctgaggactccaagtcataaacttcaaagcaagtacttgtaatgggaattctgactgacagtcccttaattacagtctttaaatatgcacagtccctgacggagccaggctttctgaggaaaattcctgcctaactggttgaaaatgtgaacagtggggtataattccctgagctgcaaggagccacagatcagagaaaatgcaagagaaactctaaagacccttgtaggatgaattttgtcttttgcaggcggtatgaaaaccgaaagaggggagacaactgggacaaggagaaacaaatatttcctgtgcttgaagctgacacacatggtttatttgccggtgtttggagaggttagaaagcaaagatagcagaggaagaataggtttatccttgaggacagaacatgcatgctggtgagtgggaagggactaaaaacaaggtggctgggccgggcgcagtggctcatgcctataatcccatcattttgggaggccttggagggaggatcacttgaggtcaagagttagagaccagcttggtgaaaccccgtctctattaaaaataaaaaattagctgggtgtggtggctcgtgcctataatcccagctactactcaggaggctgaggcaggagaattgcttgaacctgggaggcggaggttgcagtgagcctagatggtaccactgcactccggcctgggcaaaagagcaagatttcgtctcaaacaacaaacaaacaaaaaatgacagggtggcccaaaacaaggcagtcccactgatcacggactccagtgacattaacagagaccagggggacatggttgcccctgtgtgccctgggtcacatcacagccactccttattggccctagccacaggatgtgctatgtctcaggcagtggcgtgtgtgcaggtaacttctccatcagagccccagaaggcagcatggcatcaggtttggcagtcttatgccacgttgagatcagagaccttgttttattagcacagggtgctcagccaacaagaatgtcaagctggtgtttttgctaccacagccccagtttaatgacagagagtaaccttgatatgtagtttggtgaccagttaggcaggaaatttatggcaaaacacagaaatgaccacactggagtggatttaagtcctgatgctgccaattaacagctatgtagctttgcccttgggccagagttaccacgtaaaacacaaatatccagctaaatctgaatttcagatatataacagataattttccacatataacacatactaaaacattatccattgtttatctaaaatgcaaaggtaactgagtgctctgattttaatttgctaaatctggccaacgactttctcttgctgaacctcattttcctactgtttccaagtggacagcagtgcatgtctcaagggggtttgagaccagctgagatgctgctggcccagcacagggttcctacactatgagggtgatcaactgagctctcagtgcttcttctccctcaggatctttgtctgccttttagctctttccaaatgttaaactttccataaaggccaatgttatgtgtcccccatggcagaacatttcttttctcaccatagaaatcaatttattgtatatttcaaaataactaaaagaatgaaattggagtgtccctaacacaaagaaatactcagtgcttgaggtgatggatactccagttgctctgatctaatcacaacacatcatatgcttgtatcaaaatatcatctgtaccccataaacatgtgaaactattatgcatccatgattaaatataaaagtgaataaaaaagaaagtacaagaaactcagggtcagaggtaggaaaggaaggcaggacttgaaggtgaccttgatgtctcctcaatcccaagacttatctgatgatactgctcttcccccaccccatggttccctttttggctgtcaaatagcattctgagccaggcatggtggctcacgcctgtaatcccagcactttgggaggccaaggcagatggatcacctgaggtcaggagtttgagaccggactggtcaacatggtaaaaccccatctgtactaaaagtacaaaaattagccaggcgtagtggcatgcgcctgtagtcccagctactagggaggctgaggcaggagaatcacttgaacccgggaagcggaggttgcagtaagacaagatggtgctattgtactccagcctgggtgacaaaacaagactccgtctcaaaacaaacaaataagcaaacaaacaaacaaacaaagagtgttctgtatatctctttcagagccagaagatgtggttggtgtgtctctaatcaagctccctgcttttgaaagggccagggagggaaatattgccgacgagatccactcggaagtggaaatatgcactgagctcctcccgcccactcgccttgcacactttggccagggagtcccactaaccactgtcagcaaacacagcttcagaacagctccagccatgttttacgccattctgccgcatccaacataatgtctaactacatacgtgcatcaataatcttttatgacatcataatgcattttagtgtgtggatggttatgatcttttagaggcccctatttagatctatggagcaaaataggaaagtttttaaaaaatgtaatctaattaatctaagcgcacttggatgcctattaaaattcacctgtccaggattttccatttatcataattactagggaacagccattctgagaaaggggccgcctcttcatttaatacaaaatgatgatatattatcctgatgcttttaggaatggtttagacataatggataggtctgtgtgacgaattctgtgaattaacgctgtacaattagacatgttgttctttcatgtagaacacacctccaagatggccgggagacacagatcatggagtgtggacaaaatggccccatggagccaccagcaggggaagggagaccatcccttaggtagctggcaggtgggcaacctctctctgattgcagatggcaaggccactggcccccaaacagtgccagcgtccctccatgaagcttggcatcactcagcatggcctagggagatgcgtcttttgagctatcaattccccaggattggtacccccgatccagaattgagacagaagaatagggtctggagacaacaagcctaaagccaacctgagggtggcttcttggaattggaccaaaaggaaaaccccacctctccatgcccaagtgacaagaggtcagagaccccaccctctacaaaacaccgtctctcctacatcacaaacaggaaatatctgattgattgatcatgggccaatccttcatttgcatagagtgtaaccaactggaggcctctaaagagtatctaggggtgttaccaaattcttctagcttaataaaaaccctaaagaacattccaatcagggcttttgagccgcttgctcgagtccactcccactctgcagagggtagttttgctttaatcaatctgtgcttttgttgtttcattcttttattgctgtatttgtgcattttgctcaatgaaaaaactcactgtcaagacttttcagccagtaacagaaggaggtgcttcctttcatgagtataagcagcaggcacttgccctggggcctccttcccttattgggcctagggagcagctttcctattcaaccacacccaagggcagcattgctcatctgggagtccacttcccctcaacctgcaaaccctgcaattgggaggcagaaccctgatgctaaactgagcaaacctgccaggatatcaccgggaagggagttgccagggacctgggggtccccagagatgagaggccagaccacatggatgcactcagtctctttccagacccctgccaagcaccacagagtgccgagcctccccttgtcccgcctgcagacaggaagggccggcatgtccagtggaactggcccagagctgcaagccttggatctgcctgggccctctgcaaggtggaggcatttctcgggtaaagcagtcctttactgcctgtatggggccaactgttctcccctgcatggcacagggctccattctcggtaaccacagccctgaagcgtttaggaaatgcccccaacacttcaccccccactgaatttgttgtgatggggcttccatgtggcctgggaacggcctctgtgtggcctctgggctcccccagggcgcacagaaatcagagcatcccagaaacagaccttgggtcagccagaggggtggacccagaaatcccacaggtaccaacacctgcatccccctgtagctgctgaagtgtgagggggacagaaaaacccaagtggctagagctcctggtccgtgtgctggttggggaagacccaggagaaagaaggaagtgaccagattgtaggtaacaatgtggcctggcctacctgcagctgggctattcttcaacattggtgtctgagtcagggacgggctgtctctccatccagcctccttcctggccccaggcctttcactctctccatcatcctgataaaactcccatgacacaccctctctatgcagtggctgtcaagtgtcagggctgtcaggctgtgatgagaaacacaaactctctgccttcgagaagtgtgaaaggcggcttcattcaacccaacatccagccccacaggtgttctatgtctgctaggcacagttttttctttcttttcaattgaaacacaggtatggcttgctctccaggtttatcccagcccccatgctcccctgcaataaactcctggcccacaggacttggtatttgttatttgactggaccctccaggcttttgagtggggaatctctgatcctaaattgcagacacagacccagtgccaaagagcacacagtcctgggggttggggtggtggggaggccaaggcacatacaaccaactccagcaccagacagaccaaatagcccccactctaggggcacaagccatgtgccatgaggaagcaaagggagggccagtggaatccactcgaatgtgcaggagggcttcctggagaaggagacgtcagaaacaagccctgaggaatgacttagtatctgagcactggcgatcagggcacactgcgtaatccaagcatggtgtgttcagcattaatgagggtccttggcaggactcagtgtacaatgagttcacaagaccagtgacttcagctgggctccccagagaaagagactgatacaaggattcctagcaagatgtgtgttaggagatgatcccagggcccacagaggacagagtggagggtgagatagggaggagcagaaagcccacagagggtgcattagtgagcagttactactgtgggcagccagagcacaatcttgctggggaccacacctcacaatggctgcacgccaaggggcagaggagctgggtcgtttgtccaccgactcttgccagcattaattgagggctgctcctggatgtgttgattccaggacagttccagccagccacgcatgcaggtagcaaagcaggttcctgcagccagagaaaaggcttcagcagagtcttggcacttatggcaggaaccacatcgtgtgtgcatggtgcaggccaaaaaggatctaggaagggcatgcgatagcatcatctgccacaggggagaatgcacgggcagatgggcaggaccgtcagagaagctctttttttcctttttttcttctttttctttttctttttttttttttttttttttgagacagagtctcgatctttcacccaggctggagtgcagtggcactatcttggctcactgcaacctccgcctcccaggttcaagcgattctcctgtctcagcctcccgagtagctgggatttacagacatgcatcaccaagcccaattaaatgttttatttttagtagagacagggtttcaccatgttggccaggctggtctcgaactcctatcctcaagtgatctgaccgcctcagcctcccaaagtgctgggattacagacgtgagccaccgcgcctggcccagacaagcccttctaagtgaagtgcaggcaggacttagctcactaggtgcagtgggaggagaggagcatgttgcttgtgcctggtgtgaagcacccccatctagggccatagggactgctaagcaaccccgaaagtttccataggcaaatctctcaaagtttcaatacatacaggatggcccctgtgacaagttgacccacggcatctgggtggtcctaggtgggaagtgtgtatggaggtggagggagtgtgtctggtcttccgatagcatcacttgccttatgtttgttcctgtctggcctgtcctaatcctgcggtcctagagttagaaggggagatgtctggggaagcaaagtgtggatgtggaaagtgtttcaaggtaaacataagcagataagaagcatggcgtctactggcctcgagctacagacagaaggaagacgcaaagcttagggggcacctgtgacagtgatccccacacacaccccaccagggtgaagcatttggtgaaggtccaggtcagattcatcctagaagtcatcagaagttgctaaaacacctatggagcctagcacatagtatgtatttaatatatatttatataacatttcatttttaaaatgcttaacattcaatcaaaccagctctttggccttgaagatcaaataagatttgaccaaattcaaccctttaatttgttttctgagctctatttcccaaaaacaatgttttagcaaaggacagatatgaagttgagaagaatgatttcataaacttaggaatcaaggttctttatacacaagacaatagaggctcatcactggtcagttagttagaccccacatcagcatctttgggagttgactagtcctggatccctaacacaaaatccaaacattcctgcagttattgacaggcatagatagcctgagtcaagacaatgcatcacattaattatttttattttatttttttttaaagacaggatcttgctgtgccacccaggctaaagtgcagtggtgtgatcatagctcactgtagtgttgacctgctaggcttaagccatcctcatcctcccaccttagcctcctgagtagctgggactacaggtgtgtgccaccactcctgggtaatttttaatttttttctagagacacggtcttaccatgttgcctaggctggttgcaaactcctgggctcaagggatcctcccaccttggcctcccacggtgctggaattgcaggtgtgagcaaccacacccagccacgtctcatttatattcaaataattactgacaattgatttttaagtaattattcttcccacccgttagcatggagcttggacccaacagcaaatatctgccacctaaaattgagatacagctcaaccctccaaatcctttgcgtaccctcaccaaggagcccctccatccctgcgtacaccactctttcaaagcccagggcctggaagggcctggctttcaccctgagctgcttccttacagaacacagacctgggttaccaacagagcctccaccatctccatcctacctccgacctcagagagatgccagtaagatgaatgcaaactttgccaagggaaggtcttgagaaagtcaaaagccatcattattaattccccgctgtttggctgggatggaagccactggtgcaccgatggaagaggcttgactccaaataaataaacacacgtcctttgggcagatgtcgggccagctccggctgttaactgatggccccgcactgtggcagctagcgcagtgtgggcaggcgaagtgacactggcagcgcggagtcttccgcctcatcgcaacaagcttggccacatttccaaatccatctctttgaaccgacacagacagcttaatgaagcaatatttatggaactgataccactggggagatggctgctccttctctccgtctcctatttttaatatttgatctggcaaacgtattattaaaggaatatttcatctgattactcttctgtttgactgcgcgtcttattcatgcatgctgggtgccaggggaaattataccgaccagtttgggagttctattatgtcattcttccaaacagccctttgctccgagtataattaccattcatgtgcaaggctgtgggcgctctggctgacctggaccacctccttttaatcacaatggcctcctccttcccctccagtcccactcgaggccctttcaggactcttttcctggggaccaagaactttctttcttgctggggacggtgactccatgcctgtaatcccagcactttgggaagctgaggtgagcagaacacgaggtcaggagttcaagaccagcttggacaacatagtgaaaccctgtctctactaaaaatacaaaaatcagccaggtgtggtggcagcgcatgcctgtaatcccagttactggggagcctgagggaggagaatcaattgaatctagcagatcaaggttgtagtgagctgagttcctgccactgcactccagcctgggtgacaaagcaagactctgtctcaaaaataaataaaaaatttaaaaaatgaactttctttctgagagtggtctctctggatatctgaaaagttgccttgatgttgttaggggtctctaaaatcactgacttgcttatgaagctgcagtttcctcataaggcagaaacagaaaagagatgggtgcaccctggcgtggcctgtccttggctatgagctcttcgtccagcatcagcatggtgttcaatttcccagaggccaccggtctcctgactctctgcctttccttttgctagcagctagctccaccttgacggtcttgaattgcctgataaatctaccctctttctgattgggcaactggctgtatttccaacttggccttaaaggtggggccagagggacattttgagcccctaaacaaggggagagcattcaagtgggtgtggcagaatctggccccaccatcctggcagagacccagcaggaggctttgtgcacaaaacagatggggcatgaccagtgtgcaggctcagctcccactgccctgctgacaaatgaggccagctcttcacctctcacgaatttccttgatttttgtttccaattgtttgctatttactttttctgtaagggccagatagtaaatgctttagtctctgcaggcagtactgtcactgccacaactacttaactccaccgtcataccaccaaataaaccatagatgctatgtaaatgaataagcgtggctatgctctaataaaacctatgtacaaacacaggcagtgggccagatttgacccatgggccatagtttccaaagtcctgctttagacttttctgtgaattaggcgtgcattttttacatcctcaaataccttagcctcataaaactaaagtcttcatttgtgagtttatgtatgtgtgtataaatgtgtgtgtgtatgtgtgtgtatatatatattcccctaatacattcaaaatatttaactaaaagaaaatgttttaagttatttcatattccacctgaatccctccagaaaatgccagatcagatgactgtttcttgagtgtgaaaatgcccaggggccctaagcaaatcattcctttcaggttttatcaaacagaaaagtgaggcctcaagaagcaaaccacatggtccctcagcacagggtcttggcagctccaaccctgactctgcagggttcctttctcctgactccaggggtcctagcccaaccttgcaggctatggcagccttgtcaactcacgcttgctgcacggatatccacccaaaggcagaccctggctgccatgatggaacccacgttttcagaggggctgtgtgcaataaacaaatgagcaaataaaagacatgtgattttagttagtgatcaatgcaatggaggaaaagtgaaaagtaggcaggataagggaataaagaatcctgggctgttttagatgatgtggtcagagagggcatccctgcaatgactccaagtcgatatagggtggatgagaaaaactgagccacacagaacgcaggcaggtgcaatctggactgaggtggaactaggcctgccacacccaggacacaggggcagccaagagggcagcaggtccatgagtgggaaggaagatggctgcagcagaagttggagatgtctcagcgccttgcaggtcccacaggtgaggttatgaggtcaggccttcatgccagcttctcaccaagactctggccactcccctggttgctgtcagagcacgcccccttggccctaaaactgtggaatcacagctcatattcttgttcttcttacccatttcttagctgttgctttgcaattcttagaataaaagtaaagttgcaggaaatttcagagcataaacataagggtacatttggatagttgcagaaattccccagccaaccagcagcagacagggccccacttaatgaaaccttcagcgagggtcaggtccacataccctttggcagacagtccaacctcacctggagttgctgccaggggtgtgatttccacaggctttcagcaccgctgatattcatgatttctcaacagctgccattatacaacatttagatgcaaaatggacaatacatcaaagcagatgttcttggaaatcctattaactccaaagggtttgggaaggcttggaggctggctccttcggcacatttgcaagcgagctgtgtttcagttcccttggtgtgggtggatgcagctttcctgcattcccaatcattcactcagctccagagccagagcaccaaaggctgcagaaatgaacacctacacctcacatcctaaaagcactacaaggacttctgtggagctgaggtcgcctgcaaacactttcatttatttactccagaatgaccagtgtgcacgttctcaatggcacctgacaattaaccatgaagcagtgcacctagagccagactttctggagaattccatggaaagcccattgtggggaggaaaaatgtgacagcaagaggggagggcttgcatctttctaggcatgtgggattgaacatcccaaagacttcttctgctctgatttgtttactgtctataaattgcagtgttggtgtgagtagggccatctgaggatcaagcatgatgatggaggccctgccccactggctacagagagtgtccaggccaggatgaatgtggtcatcatggttcctacatggttcctatcacggcagctccgtgcaacacaaaccctgactctccctccttgcctgcttttctccttggctggttccttctcaccctgcaagtcgcctcctcggagagaccttcccaggacatccatcagtacctgccctccccagccacgtctctctctgtcccgtcacctagttttattgtcttaataacagcactttccactaatggctacttgtgtggtttgttgtttcccactggtgtgggactccagggagggagctggcccctggtacttagagctgcagagaaagccactcctattattcccagccatgtgtggagcccctgcagctgcagtttgaggactgtggggttgctgcatgggaagtatagtcagcaagccgaaccctgcaccgagcacgcttcactgtttgctaaactctgacgctgagctcagagccggcaaggtccctcagcttccaacctggctgctgcagtagttttgagggtccttggcaggtcacccaaggaagcagaggcatttcagaatggaggagacaggaagaggcacatctcagcaaaaactaactttccctgtgcacagactcacccctcacccaggtccgcatggaattgagacaggccgacaggctggtttcctgttttaatgtggtttagagaaaaaaacaaaagccccttactcatgctatagtttacctaatttccagccaaccagcaacaaagacccaagaagcagtgagccacgagctcctgctgtagggggttagggacttcctccgcctacacgtgcggttggacttaaactcaccttatagtgaccttttcctccttttcatactaaaagtcacacccgtattacatgcaatgtatgaagaaggatgtagaaccagtacacaagtactagagaaacctcctatccatgccctgacaaaacccttcccgaaagaaccagcccacatgctaccctccagagcagcccgtccttgcccttttgcagtgctggcttcccttgtgcaaaagctaaatgaagctttctctttccttaagtgcaatgtccggcaatccatcttgattcctatcctgggagattgcaagaacccagggcgctgataacaatcccttcactcatggcttcgttttcttcattggtcagtggaagctgagtcaaactgcactgacaaacatccccaatatctccagggtttagcacagtgaagggcatccccgttttactgaatgtcccacatgggtcagccaagaggactctggtcctcgtcaccctcaggggctcaggctggggaagctctgtctccacctgtgattccatgatgacgaagtcagaagggagcaaagcaggcactggctgtgaggtgtcacccagaggtgacacacatcacttcctccatggctgatcccccaggaccccttcgactcattccacatggccctacccagacacccacccagaggtgctaggagtgcatcccacccagtgcccagggagcaggaatccgggcacatttggtaacagcacaaatgaccaccacccctcctgtgtcactgtctgtgctggggaaattggaaaggaactagtcttattaagagcatatgctgggccgagcgtcatggctcactcctgtaatcccagcactttgggagaccaaggtagatggatcacctgaggtcaggagttcaagaccagcctggccaacatggtgaaaccatctgtactaaaaatacaaaacttagccagatgtggtggcaggtgcctttaatcccagctactcgggaggctgaggcaaggtaattgcttgaacccgggaggtggaggttgcagtgagccgagatcacgccgctgcactccaccctgggtgactgagtgagactctgtctcaaaacaaagagcatgtgctatgccagtgttccctgtgctgcacacatttgtatcattattattatctcatgtgccaggagaggaaatctgtctggagaggaagggcctcagccaggaccacgagtgcgcaagcagaacagacagaacccaacactggggactgggccccagggcctttgcttttataaattttattttattttttcagttggggtcttattctgtcacacaggttggagcacagtgatgcaatcaaactcacggcagcctccaactcctggactcaagcaatcctttctcctcagcctcctgagtagccgggaccggaggcaaatgccaccacgcctggctcatgttttaattttttgtagaggcaggggttcttgctgtgttgcccaagctggtatcgaactcctggcctcaagcgatcattccacctcagcctctcaaattgctgggattacagcatgagccactgtgcccagctggtctttgctctgggccgcaggacactgtcctctgggcgctgcaaggccgaggcactatggctctcgtcctccctctgtctccagctgtgcgggactctgggtttgtggctgaacctcactgagctttatttctacatttgtgaggctggggacttaattcgtgctctgctcttgacttcaggattaagcatgggtgttgtgagcatccataaggcccaccgagctaggaggtctccagggaaactgctttcctcaccagatgcctgaagggtgccccattctgcaggggagagaaggaggctgggaccagcctgcctggggaccccagtggagatccgagcagaactgggtcctatcaagagaggagcaaggatgccagtacttcagaaggctacagtggcggagacacctttgaaagcattttattctgccaagtcaacaaccatttataatcactgtcatttcacaatggaaagggcaatgtaaggccaaaggggtggaaaaggtcagaacttgggaaaaactctaattgaataagtatagctatgcaaaacataacttgagtctgttttcctcatttcactgcaagtcagggcaaacatcagcacagacaagcacctgccagtgagaaccaaaaagcagtcttaccattgacttttagagttctttcgaccacaggccaggagctcctggccagcaatgagggcaccagtgcccggccacgagcaacagtgatcccacaacagtgggaagaatcaggatttgcacactccagttttcacgtgaaatcacttagcacttaccctccctgccctcaccacatcactgctgcaccctccctgctcagttttcttcctcccctcccctcacgctccttccctgcccctgtgagagcccggcccttgccctctgtgacctggggctccccacctcctggaatctttgggctgggaacacctacagcctcctccaggaacagtaattggacttttctttgagactgtccccaagctccttctccttgtttatctgctctggattaaaaggccatgaagaattgattttgcaaaggcttaataatcaggcacagtggacatgtatgtaattgaatgacagttccggattcatctttcacaacaactgtggtctcagagctgctgcgccaatgacaaagtggagacaaatgagcccttttagcatgatgctaattactgccaagtccagcctcagggttttctctctggctgggcttgggctggtccagcaggggaaggattcataaccctatagtcagaaaaaggatccgcccacctcggcctcccaaagtgctgggccagctacccaggaggctgaagcaggagaatcgcttgaacctgggaggtggaggttgcagtgagcccagattgcaccactgcattccagcctgggtgacagagtgagactttgtctccaaaaaaaaaaaggagaccgggcacagtggttcacacctgtaatcccaacattttgggaggccaaggcaggtggatcacctgaggtcaggagttcgagatcagcctgaacaacatggcgaagccccatccctactaaaaaataaaagatacaaaaaccagtcgggcgtgttggtgggcgcctgtaatcccagctactcatgaggctgaggcaggagaattgcttgaaccttgaaggcagaggttacagtgagctgagatcacgccactgcactccagcctgggtgacagagtgacagagtgagacaccatcaaaaaaaaaaaaaaaaaggagccaggaggtctcagagcttgttactgggaattgggatgggaggcagggctggcctctttatgattctgctgagtttccattaaatcaaagcaggtactgcagatcccccaattagtcagagggcaaatgatggaagcccaactcaaactgctcagacagtcatcggaagatattgccttatgcaaatacaaagaggcggatccaagcttcaggcaagctagatccaggtgcttaaagatgccattgggcatccacctctctccacttacagcctgctcttagctgacttcactctcaggaaggcttgccccaggcttacatcctcaagccaagcgaccccagtacccaaacagctcccactttccaccactagctccagaaaacgtgggcttggcttggattgggtgcccagcctggtgtatttaacacttactaagttccagacaccgtgccaggttctggagacaccaatataagacctgccacctttactcaaggagctcacagctttgccggaaaaactgggcagtgaacagacaacgtcatgagtaacctgtgtacaatgccgttccctgtgagaggccgagggctttattacagggcacagcttcacaacaaaattaaatttttcttttaactgtgccatcctccaagcctctggcccaaatatccttcacccagcagagtggtgaagagctcagagccccgcagtctgacatctgcatctgaattctggctctgccatttaggagttctgggaactcagaaagcgaattcatttctctgtgcctctctacagtgaggctgataagaatgtctacctaataaggctgttctgaggattcattgacaggatgcacacgaggcattgaattcactgccaacacacaacgagcgcggaacaagtggtctttgctattatttctattccccgctggctgctggactagtgatgggggttttgatgcaggacaggcgagccccaaagtggggcttcacccaggaaaaaattcaacagtgagccagtggtagggtagaagaaaacagctttatagaagcagcagtgttacagctcttggaatgatacagcccagtgatttcccctgcagagcagggctacccacaggcagtatgctgagagcagcagctcaggccagttccgcagtcagatttatacccacttttaattacatgcagattaaggggcggtttatgcagaatttctagggtagaggtaataacttttgggtcattgccatagaaagtggtggtaacgcctgggtgttgccatggcaatggtaaactgacatggcactctggtgggcgggtctgatgggaagctgcttccgccctgtccctgttttagctagtccccaattcggtctggtgtttgagccctgactgcggggtcaagtcccacctctgacctcagtttgaagccccgctctgtggggggaaggctctggagtgttttcacccagcacagacaaaggcccactttggaggcaggattccaccagacagatatctgagacagaagttgccccccaagacaaaagggactctgatgttactcagggatggaatttagaagtctcatgctggggaggcatgagttcccagggtgaacacaggaactggaggtgaggggtggtgctgaaatgggcctcgaagccagcttccagcaccagcatgtgaagtcctgaaccaagggagagagggggtggcaggaggtggatgggacatgtttggggtgggggtggcccttgggagaaagagttcatgggatgaggctcagcctcttgaagggctgggggtgccaaggccacccacataccgccaggcgcagccccttcacggcacatcacccagcaaggactccaatccctgggagggggaaatggaccaggagcagtagcaggcacctccagggatgcccaatgtgcatacccgctgaggacaccgctcgcagttagagcatggaatcagagctttgagggaggctggcagagctccagttttgcgtgggttatccaccctcctaaaataatattttcaacatatctgttttctgccaacagaacggaatccaactttcttagcctggtgtgcgaggccctccctgtctctggctgcagcctacaaacagaacgcaaggcagcttcctcggccaccccggcaatggctctcacacatgtcactgatggggaggaggaaaaagcccccagacccccagacttcacttcctccaagatcagcagaggttttctttctttctttctttctttctttctttctttctttctttctttctttctttctttctttcttttttttagatgagatcttgctctgtggtccaagctggagtgcagtggtgtaatcatagctcactgtggccttgacctcccaggctcaagtgatcctcccatctcagccccttgagtagctgggattacaggcatgtgccaccatgcctggcttttttttttttttttttttttttgagatggggatctccctatgttgtctaggctggtctcaaactcctgggctcaagtgatcctcccacctaggacttccaaaaaattcaagtctattttaatgttctttaaatagacttgagggaaaaaccaacccctgggaaaaccaggggctgaaagccctgtcctcagcgggagagcctcagcgttcttacagaccaggtccctaaacatgtggcttcaagggtgtctccctttcctctccagcagtgacctcctcaatgtgcctgttcagtattccataaacggagagcatgggatgcaaaagctgccttggttcagctggggaaaaaatgcctttgagagttttatcaactactagagacagcccctttataaggagtatgcggaacagccaccccattgtctgagaacagtgcccatgcagagatgagaccagggaatcccggggtacaggcatctccactgggcacagctacctggcccactcaaggttgtgggacctgggggaccagggaaactacccatcatctgggctgggctgagccaatcgcatcctcccacttgagaacttgaggctggaatcaatccctagtcagtctttcttgtgcttgagctgggagggacgaaaggctgagacagtcatttccaccttgaagaaggagaagagaaggtcacacagcagtgagagaagagagacaacaaagaagggaagatagagacagcggctgctttgccaagtcccacctggggaggttggctttgcgtccagctcatggggtcctcgaactgcccctatgtccttttcccaattaaaccggcctgggcagtttccgtcctccacccccagttatcccaaagacgaatcccagccacttccacagccctcagcagatccctgggaatactcaacaagacaggaactgagcttctaccccttaagcaattctgcaatcttttcttcattggctgcctcctcaaagaccccaagtttggtgccacttgggctggacacagtgcaaggcccagggaaccaaactcagccctctgccagcacagaatgtgagacgctcaagaaaatgttcacgccgtgggtgctgctggctcctcgatgagcgctggactgagctattaccatatttcactgccatttacagagcacagctgtgtgtgctttagtttaataaacagccatggtttgtttcctgggccaatatttcttttgtatttactgggcttggtttttgtatcttggtttaaaagattggctcatgggtctgccttgtgtccatcaccttatttctactgacttctgcactcccagccgccccttcttcatgagctttcagcttgcatccccttactggaaggagaagccattctgacaccctagacccactgtggttttctcctctgcctccacctggtttctgtatctgccaggagtcgcttctgctgggcaccccattggaaagatagcattgcagagtgaaaaactccaggcacccccgtgccctgtgactcactataggaccatcacctctagctcaccatgtgatcctgagcatgtcacttcctcccctgggccctggtttcgtggtgcgctggaggaaggcactggcccagagctcctccggcctcccgcaggtcggaccagccatgtggctgtctccctgcactcccgcagctcatcagggctgggctcagctaggggaggtgcctttcctgcaactcacccgcagctcagctacagatgcacccttgtcagtgcctggttcgggatacagccaagcctctcaggccaggcgcagcctttccagatgcatggcccggctggagtcctcaactttgtatagtgtccacacatgccgccgagggtctcccgagtatctctgtcactttcctgcattggtgggtccctgtgagctgtccttcacctcccaaggcttccactgggccctaggacccctgtgttccagactggagttggggagcaagaaggtgtaaagattgggatagataggcacaaatgctaaaagctatttatttttgtccactatgtggtaatttttaaatatcctcataaatattttggccctcctccctttgcaagatgagctaaccccctccccatgtgtgggccatgcataatgatccttattaggagaatgtgacgggagtgatgctgtatggctcatgctgtatgtatgggaataatgctgctcatgaaaagcatagcttctgctgggagccctctctctgggattgcttgctctgagagaagccagctgctgggtcagggggacactcaagcagctcggagactagagccgtgaatggaggaacttccttcccaccagcacccaacaccaactcgccatgtaggtaagcctcaggtggctttccccctgagcctcaagtgtatcttccaacgctaggtgaggctttatgtgactgcaacctcacaagaaaccctgggccagaactccatgccaagccaccaaatccttgacccagaaactcttgactcagaaaggctgataatcagtgttcattgttcaacccaggtgcccatcagcaatggactggataaggaaaatgtggcacatatacaccacggaatactacacagccatccaaaagaatgaaatcatgtcctttgcagcaacatggatgcagctggagaccactgtcttaagagaactaatgaaggatcagaaaaccaaataccacacgttctcacctataagtgggagctaaatcgtgagtacacatggacataaagataggaaccatagacactggggactactgggggggaaagaaggagggagggcatgggctgaaaaacacctattgggtaccatactcactacctgggtgacgagatcatttgtcagaaagagaaaaaaaaagtaaaacaaaaaagagtaagaaataaatattgattgttgttttaagtcattaactttgggtgatgcattatacagcaatggatgactaaaacaacccgagtccccccagaagctaagtctgtgtcacgcatttctctctgtgcatggagaagcaggagagtccttctatgatcgctgagttgcctttagtaagatactgagcaggtgaggcttcactgcattgctgtgcagcaacctcacattttgcccagctctcatgcacgtggctcaggtgcctccatgcatctacagcctttagctgaacgaggtctcgtagggcctgagtagccaccacagtccagggctggtccagaaaccactcactttaggagaagcatggctgagcccagagaagctcctgtcaccaagtccacaaatgccaacactgaggcagcctcacgcatcatgttgcgaaaaatatttccctgtagcacaggaccacaacctcagctcaaacctgtgctctgagaaccatggtaggagcatgacatgggcagtcagagatctttgctaatgcagcctgctggcttctccaaggcatgtctggaccaaggtgtatgaggttgcatcattccctcctgacacaggctctagatgccaagagcttgaggagagtgagagggatcacgtttgtgctaagccaggcctccagccaagagtgctggaggcagcccagcctctctcgtcctcatgggcaatgacagatccatcatctaagctctaagcatggagcccagtgctgccagggatgcctgccagctctcaatgtgcccttatgggcctcgcattataaagggacagacattcaagtcaatccagtttagcaaacactatctgaccatctactgcctgtggggcacaggagtagtggctagaggaaagaggaagccagtgcagctcctgcctccaaaagctgcactctctagcaagtgaagaaatacaggatcactcaggcaaaatgtggacaaggctggagctaaagtattagctgtctctgcctcttctgagaccctaagaattgtgaacattaagagaagttctgtcaaagggtctatctttggcatgggctctgaagaggtcataaagaaaggcttcggccaggtgcagtggctcatgtgtataatcccagcactttgggaggctgaggaggaaggattgcttgaggttagtaatggacccactaatgtaggaaaatttgagaccagcctggacaacatagtaagaaccccatctctacaaaaaaaattacaaattagccaggcatggtggtgcatgcctgtagtcccagctactcaggaggctgaagcaggagaattacttgagcccaagggtttgaggctgcagtgagctaggagctaggagcaccactgtactccagtctgagcaatagagcaagaccctgtttcccaaggaaagagagagatcaagagaaagagagaagaaaaagaaaaaaagaaagaaagaaagagagagagagggagagagggagggagggagggaggaaggaaggcaggaagaaaggcaggaaggaaggaaggagagagagagaaagagaaagagaggaaggaaggaaggaaggaaggaaggaaggaaggaaggaaggaaggagagagacagaaagaaagagaaagagaggaaagaaggaaggcaggaaggaaaagagagagaaagaaagaatgagaaagaaaagaaagaaagaaaggaaagaaagaaagaaaaagaaaagaagaagaaaggaaggaaggagaaagagagagaaagaaagagataaagaaaggaaagaaggaaagaaggaaggaaggaagaaaggaagaaagaaagagaaagaaaggaaggaaggaggaaaggaagaaagaaagagaaaaagaaagagggaaagagagagagaaaggaaggaaggaaaagaaagaaagagaaggagagagaaaggaaggaagaaagaaaagaaagaaaggaagaaagagggagggagggagggaggaaggaaggagagaaagaaagagataaaggaagggaggaaggaaggaaagaagaaaggaaggaaggaaggaagaaagagagagaaagaaagaaagaaagagagagagaggcttttagtgaggggcaacaacacaacagaagacatcatcatggaggtgacatcatggaggtgcaggacagcagggtgtgctcagggactgtggccatgactctatcatgccagtaggttattcaggtcagctagcgccatgataatgttgcataacaaacaactcctaacagtagcagcctacaacaatgagaattcgtttctttgctcacagttgtctggttgctgagatgtctgtatgctagactgctggtcaaagtcaggtctgctggcatgtctttcattccaggacttgggctggaggagcagtacttacctggagcacattcttctccaagtgcaaggcaagagggcaagagtccaggttcaatcatattgaaagcctctggctggatgtgacatacatatctgcacacattccattcgttggagcaagtcacgtggcctgctcagtaggaggagcaagtcagtagggcagagaagtactctctgcttacagtgagcctggaaaagtgtggggagcgaaggaaaaacagtgaacaaataatacaatgcaatgcaatacaatacaatacaatagatggtgaccaagaagtcataatatgagactggaaacacacactaggcctcctgtgggagagactagattgttgttcaccaaacaatttctcttttcctctgcacacaaaactaggtatttcccagtctccttcgccattagtgtctgaattctggacaatggggtatagcagaagtgatggactctgcttgcaggcccagcctgctacaacttcctacttcaccctccactctctccttgtctgctgggtagatatacaaacccagcagaggaacctgtggcccaaggtgatggcagagccacaatgtggaaggaggctgggtccctgagtcaccgcctggacagcagccacccggaagatctacttgacccacattagtctgtttcagcagttgtaagtaaacttgtattgtgctaagctacagggatttgggggttatttgttacagcagttaatctaccttactattcccccgtgtcacagaggccctcggtgtggggctaagtgaaacacactgagaaacgaagtcaggcaggcttggattgaaatatcagcactagcactgtttagcaggatgaccttgaacaaattgctttacctctctaggtcttagtttttcatttttagatgggatttatagtccctgccttaaaaatatatatatatatatataagtgacaaactctgttactcgaagaggtggggtatcttgctgagacttggcagagctgcactattgatccaggagcttacaagaggcttttgagagatggcagcatgatgtatcaaggcttcagtcttcctggggctcactctgctgtgggcagggaagtgggtggggagcaggatggccctccatggagtgggcctggggagacccctgctgcaaggtaggcaggaccttctgcttcaccaggggtttctccacgcatctgctagaagcttgcagaaaagggggctgttgattctcacctcttagcctgccacctgcctctgactccccagaccccccaccagtgaaacctgcaaaggccctctgaaccccagatgctgaggctcaagcttaaccaggtagacagatgatctcccagagtaagatgagcagagggagctgggagggctttggaggccccaggacaaacaccaatgcaaaggcctgtggcagccttgagtctgggtggccaggcgttacttacattttattattttagtgggattttgctgctgctattgttgttgtttgtagagataggggtcttgctatgttgcccgggctggtcccaaactcctggcctcaagtgatcctcctgcctcagcctcccaaagtgctggacttaacaggcgtgagctaccatacccggtctagttttgttctgttcggttttttttcctgaaagacacagaggaagagagcatagacttgggagattttaaactcccagctctgcctcttgcttgctgtgggacttcaagcaagctgcttacatctctgttcctcagtttcctcaactgtaaaattaagccaattgcagttctctccgtgtggcttttttttttttttttttttttttggtgaaaatgacatgagttaatatttgtaaagtatatagagctatgcctgggatgcatgaagggctgtgccagtgtttgttcaatgaataaagcagacaagagagtgaggcaaagggagagacaggcaatgagagggggaggtggagggactcaagacagagagaaagagacagcagtcagatggcacagatagggaggccaccaggtgcacagaccgacaggaacagacaagcaggaaggagggggcaaaagcaaaagcctttaaaaattagagaaagagacccagtgaaaaagaaaaggggaggccaaaatcacaaaaatccaattagaatggaacacaaacggcgttcttatttaattgcaaactgccagctcaccaggtggccttctgaaggcatctcaggtcaaaaaccatcacccatccctgataaagccatttgcctacattccctgaacagaggggacagtggccagcctctgaaaatggtccagctgtgaaagcccagaaaccccaagccgcttttgcagcaagtgtgcacaggaaaacggcaggtcccacacatttcccggcactggacactcagatcctgtctcctcccagggcaccccagttctacccatggcccagaccctcatcctgtcaaaagtccctaggacaaggcttgagacaaattaagaattttattgaaatttttatttcccaatgcagccaagctgacaacctctctctcaagtttcagcctaatgtgatttcaaatggcagccttatacacctctgaaaaatggtgtttataatcaaagcaccagcagctccttaactctaggggcactcctgggctcagctgtaatgacattagcgtgtttagagctgtcagaagcaatgtcactaatctgcgtctaggagggaagaggcaatgataaatgaatggcgtctctcaccataacgggtgtccctggtccgccagctacctgcctggcaaacagctatgactcagtccctgctaagcagaacactggccctctccctggggtctgggtctgcctggtaggcttggacaatcacagtacccaggcagagaaggagtgaatcagaagcaccgtggtgatatggaaaccactgaagctaagaaacacggcagcacttggtgagaattcaagaaaatggcctgcctctactcatgggaacaactgagcccaagccccaagccgactgccaacccctgctttcccatgtcacactcaatcttttttattttttctttttttgtggagtcttgctctatcacccaggctggagtagagtgccgcgatctgggtcactgcaatttttttttttttttgacacggactcttgctctgttgcccaggctggagtgcagtggtgcgatttgggctcactgcaatctctgcttcccgggcttaagtgattctccttcctcagcctcctgggcagctgggactacaggtgctcgccaccatgcccagctaatttttgtagttttagtagagacaggtttcaccatattggttaggctggtcttgaactcctgacctcagctgatccacccacctcagcctctcaaagtgctgggattacaggcgtgagcccggccacacctttgctcttgacttcatcttataaatgatggaacacataggcagacgtacagctccattttccagcgcgtaaaacaagggcatgacagtccaattcttgggggtgtcacagggatgctggggaatgacggattacagtgacatagatggctcagagggtggcacacagcaagccctcagcaggtgtgacctgctgtcgtcctggctgctatcattcctcatcacttttattagcttctgttaatattgtaatgaaattaagtgacatggcatgttttcccatgcagactgaattccccagggcctgagtccactcccacttttgtctctgaccccagatgcaactagaaatgcactcaaaatgtatatctccctagcacatccgccagaacaaacatcagcgtgccgtccctgagggaccaaaacagacatccccagagcctctgccccatgtctcacctgcagctggggctaaacagtcatcattgcaatgaatcagcacaggactttgattatggaaccatcagcatccccgtttcagagaggagaaaccgcaggatcagaaagattcagcaggaggagaggcgggaggctgacctgggtctggaagtcaggaaggctggtgcttcacacttcactcccatgtctggccttccatgtggcccctcccacaactcacaagatgcttctgcaggcaacaccagcctcccttggaaacagaagggccacgacagggcacacattcccgtgtcggatggagttggtggggaaaagataaattagcaagagtgggggaagaaaaataacttcctgaggagagagcagcggtgctcagttttctgggaacacgcacacgcggactcagagaaacacacacagcacaagcacacacacacaacatgagcacacacaaggacacacacagatgtgagtgcacacagcacccacacaggcaagtgcacacacagaatacacacaaaaacccccacaggtacaagtgcgcacacacacacacgcacacacacaggcacacctgtcagcttctggcacaaagctaacacaggctcacatagaatcacaggcactcacatacacacacacaccacacacacccacatgctccagtcatcctcaaccccagcatagaagcattaggcccttgggcacagccttcctagaggaagcagcagaacttgctcagagctcacttccacaactcctccctccctccccaccccctgtgcccctgcttcagacctgggcagcccctaagttctctgcaggttcttgagcctccttagttctggcagctgaagtccccagcctctagggtggcacccagggaacagccatccaccccaactagagagggtggaaatctactgaagggccagtccggctcctggaacagccctgggggcaggtgctccctgaagcccataggactctgtctccttggcttctctccctgcctctcccttggcctttctgtagaatttcacagccactgatatgcaggaaacagcgaatacctggtttcaaaaagggaagccgtgctcaggagcctgaacacaggaggcccgaaacagggcttgtgttgcatggacctgaagccagaggtgagggcgattaggaaattctttcccacatcaggggaaggatgctgttgaaatgggaggcccaaggcatctctgcaggacagagactggacatatgcccagagaggttcaggtccgtgagtctggaatatcctcctcctccccagggacaggggagcaggtctggggcaggcccattggttggaggacggggaaatgagctgtagatggtgcccctttgaccctctgatccatcttcctgtgcctcacagtctgaccaccaacactatgatcacatagttcatgcaggttctcgtaaattcattccttcactctcgactgtgaacaaatcggctgttgccttcatgctgctgaaaagctcgtccaccctggctgtttctgctccatgcccgcctgtctgcacaggggagtgccctgccctgagggaaaccaggcattcttctgggccagacagtctcctggaaatgaggaagggagagaattgtctaaaactgctggaaagttgaagagtacaccacatatacacagaagcatttgtcttttcaacacactttctctccccttcagagggaccagggctgaaacctgagctgattcagcccaaaggagcttggtgactgcagggagtccactatcagcaacctccttcctcgaccccaggagcccagagtctcacctgcccagaatgtgccaatcactcattcattcaacaaacttcctggatcaactgggccctgggcaccctggtgctgagatgaaaggccagcctccactgcagggacacactctggagagagagataagactccaccagcgactccacatatggctggaagatctgtattttaagagaaacgtgaaccagaacttgcttaaccccaagggttgaatttcaaacacggaattggaggcattggtgagcaagatatgcacacacacggcatcatacagcctgctttctaagcgcaaggccaaggggaagaggtggttcctgccacactctgggaccccgctgggtgactgtggcctggcatggtgagctgggggccagccactgccctcaggacagcagggtcctctgcctttcccccgcagagtggcctggcctgcctcatgcttcctgcagagctggaggctgatggactccagacccagcacttctgctgcggcctcagccattctcccagctcctccccatctggaggtcgtgggtagccctgtgagggtgtgggcttgggagccagctgagcttgggagccaactaggcttggattcaaatcctgcctcggtccctctgttctctgaatggaaatcctcacctacagtgggggagctggcagtattcctgcagggctgctgggttgaagcacaggtgcaggcacaagccttgctcaacaagtatcgggaggctcctcccatctggagagcacccagggcacggcatgtggcccaacaggaccaggctggagatccagggaaggcggggatggggaagccccaggaaccccctgcagacaggaggctctgccctgagactgcttcctcctgccaagcccccgcaattactcaagtgcaacaggcgctcgtggtaatgaagttggatgcctctgagtccatttaatgatatttaattatgcaccactttcaactgacaggctgagggagatctacacctagctcctgaccctgggcgggctgcactcatatataggtctcatgtagactttaggactgcttgtcagaaactgtgcttttgcctggagaaaaatgactcagaacaaagagagccggagagcctacaggcacagcgttcaggcaccttccagaggaacctgggaagggtctctaggcctggcctcctagttcaacaatatctcctgggcacctactacaggccagacattgtgtcaagctctgggaataaagccatgcacaagacagttgtgcagtacaacctccgcccatggggtttccagcaatgcccagatgggcagacatgggcatgggagaagggagggctttggagtggagaagaaatgggggcaagctccagaggcttgtgtgctttggggcctctgtcaaagagagcccccttttccccaagccctgtgcacctcccacccacactcacctgggtgccacctgtcccagcacctgagctctggacaacggaaacttagctcgttctccaagttgatttctcaaggtttgcatccaggaactatctagaggtgtaaaggttagccttaccacagtgcacagatctgggcacactcagccaagctgttggtgagataaggcgctgaagaccccacagtacccttcaggaggaagaccccaatcccactgcccagacagaacttcatcatgccatgcccgagttccagtcttcctgagatttttccattgttcttcaagagaaaggaaaggaaaggaagaaggtgggaaagaaagaagaaaggaagggaaaaggaaggaaaggaagaagaaagaagggaggggtggcaggaaggaagtggggagccgagatggagacagatgtggtaggcacgtgtagatcagccttgcccaggcttctgctgttcttggaggatgacgacgattctctccgtatttaagaagctgtgagtttggcctcctccagttccctggggcttgtggctgttttccaagccagtgttaagggactgaggacaggctgtgccctccacggatgggacttgctggacgacatcaagacatacaattccgctctccacagtcagaggtatcgccatccacttagtcagtctaactgaaaatgcatctgcaattcctgttttgtttggttttgtttttaaggattgctttccctagcctatcgatctccaagcctgacatagccttctgtaattgtacccgagcccatccgccagaatgatgaaatgcctgtagtgtcacctgccaatagtgatacgatttaccccctagaattctccccggtggaggtagcacagccaggctcactgtcatccatgattccttggggaagatggtttctcaaacaagatgactgtgttctccccaaaagacaccaagtttccagaacgcttgcatggacagaacagaggacgaagccaacacccgcagttgctggggacaaccgagaaggctgctgtgcatctgtgctcagacatcagcatgtgccccagccagaggggcctcccaaggctgaagaggatgccgtgcacagcagaagggccatcctccacctgccccagagagcagtggcttcttcaaggtgcctgtaaaccaaaaagcatctgagacgggtctcagtcaactcagagtgtattctgccaaggttgaggacacacccaggaaaaagagacacaagtaggatctgtggcctgtgctttttccaaagagggtttggaggacgtcgatctttaaaggggaaagagcagcaggaggggaaggaggaaagaaagaaaaagggctggtaggtagtgaggagagtggtcacgtgcttctgaggctttgattagcgctcactgagtccacttgttgcagtggcaggagggtagagaaacggccaattatgcattcattttgtgctcagtaaatctgcactttacataaagtaaaataaagtaaagcatggagcagagaaagaagccagatgcgtttgtctcagggtgagtggaggaatgtctcggcccgtctttgtcccatagctgtgaaggtgagctggtcattgacgttgtcagcgtcagattccacagaactcatttgagagctagtttagaggggacatgcggattctgaaagatctgggggcccacaaggaattcccttgtgattaatcagtgaggaaagccacctggggagacgtatggccttctatcactgcagctatctcttcagagaagaaaagaaggactcagtttccaagcttcccttttcccttggcatagtgagtctggggccctaagattggattttcctttcacatgtctgtcccttgagccccgcactcatcccccagcattctgcaaacttccccaggccagaccctacggtaaggacttggacccaagcaggcagtgtagatggtgatcctgggaaacacccacgcgggaggaaagggacagcagccaggacaggtgtgacaatgagcaggctgctgctgagggcatactggggaggtgggcagggcaggccttaggctgtccccctgggggcaggtgggctggaggatgcatggacccgctctggtccatccttggctcctgggggcatggagtcaccaaaactcctgggctgccccacacagaccaagcccactcttgttccaaaagaggcccttgggagaaagggccacagtgggcatgggaatgatgggtgccaagcagatgtgggcatggtggggacagggtctgcagtgtgctgagtgcttggccgtggggttacaatgagtcacacagtctctgctctcaaggagctcccactgggcacaagggaaaaaaggacaggagacacagcccctgagaggctctcacggcctcccgcagcagcatcggtacccacacggcctggcctgaaagtccgcccggcctctgggcatgggagatgggcagaattccgtgctgctggcctgggatcctgtcaccagcaggagacagtaacagtaacaaaaccacaccacaaactgagtccacaggtctgtgcctcccacgcaccaaaccctgtctctggggatgacagtgagtaggaggagaaacgtgtttctcacatcgggagacagaaacaggaggcagggcgctgctctttcatctctcaggcgatgcatgttcatcacacacagagtccgggggggcaggagcagcttcaagtctctctgagctgggagctcacctctcacgggtcacccaacctctctgggttccagattccccatggggaagacccaggcacattaagcttccagacagcccagagtgggaggcagcagagtggagtggaggaggtggcgcccagcccacgctctgcatggtcaccaggctcctgagccagacatgcccccaccgcccctaccgggcagcggcctccagctgcatcaccgtgtgtccagaacacagaactcacaggggcctccggaacctcctgccaggcctggtgttaacagactctcctcccaggaccccccatatcctgcgtgacaaaatagatgacatcaggaatcccaagatggagtgcctaaggggtgcgaggccagagtacaggtgcccactggccgagcgcctgctcccgaggctgactcagctctctggagctcactttgctctagaccagccagcgtgtccaccctgctctcctcccactcctcctggctgagagatctccaaaagcctcacccccacccgcaagcctggccagcttctgcagggtgggggcacagctggagccaaataggagccagccctcctcaaatgccctcctgtcccagctgagacaaaggagcctccagggagctgcccagaccctgagcgcatctcacctctcccgttgaggaggacctggtgtagaaaggagtgctgggtgttggggggtacaccttggtcattttggccttcctcccaccatgacccctcttgccctcaaagagtgctggacagaatctttctcagagggccaccccatcgggaagtcccctacgtatctaacctccatccatcatgctgtaaggcagcctctttcctctccttctgctgttagttgagatgggctggagccgagcttgtgtccaaatgagagctgctgtggacccagtcatggctccgtcagtgcccagcgggagcctttagtgagaatatcagtgacagggatggcagttgtttgctgaatgcttcctgtgggccaggcacggctaagtgaaggatctcacttaccatgtgatgatcagcctctcataggtcaggaggaggccaaggcagttaaacaacttggccaagacccagccatgggtgagcacagagctgagatgcagagtggcccctgccctgtgcctgcaggacacccgccactcctgggaggcctcagcattgggtgtcaggagggacccaccgagtccccccaagagcccctcggctgtgctcccctccccctccacttaggcactggcccctccagcagacccctcagaagcccagtgacatcgagggagcactgatttgcaatgacagattgagcagctggaaccctgcccatccatcctcagaactgccttgtgctcccagcaaccccacagccaaatcgcagaaaaagaggctgccctccagcacagccagctctccaggcttgcacctggacgcgtgcccactctgggcctcagcccctctgtctgtgatggaggccagaggcccctcccactcataacagggctggcaggtaaggggcaacattgccttcctgtggagttgcacagtccccagaagcaggtggtgatttaaacaccctgattcgcctgtaatcccagcactttgggaggccgaggcgggtggatcatgaggtcaggagatcgagaccatcctggctaacaaggtgaaaccccgtctctactaaaaatacaaaaaattagccgggcgcggtggcgggcgcctgtagtcccagctactcgggaggctgaggcaggagaatggcgtgaacccgggaagcggagcttgcagtgagccgagattgcgccactgcagtccgcagtccggcctgggcgacagagcgagactccgtctcaaaaaaaaaaaaaacaccccgattcacaacacaggccctgtggggcaccaggcagtggcaggcacaggtggcccctggaagacatgagtgccctggagaaggaaggctgggcctggggcaccctgggctgccctctgcccaagccacaggccccagagactcttcccacccaagccagaagtggtgagtcccatctctggcaagtctcagccctgccaaaggcagggtctctttcaccaggaactcagcgttctgcatcttcgagtgtctatgtaaataaaacaaacttctgtctgtctgccccccacgccctgccccatcacaaggcagccagcgggtcttagatcagggctgcatctgtggtgttcccactcaaagcagcctgggcgctctgtggtgcccacactgccctccttgaggactttgaaggcacctcggaggcagtccttctcagagtggctgaaactcagaaagcatcacaccattcattcggagaccccacgcatgaagagagctagggtaggttcagctacaagccccagatggaagggcccaggggcagggtcgagctgcatgagccactcctgggggcagccctcccaggtggcagcagctgagtgcattgttggtgagacgcatggcttttctgagaagcacgggtaagttggtgagctgtgctggagggaacgaggcccgccttccacgtgctcccctttcagctggtggcaggaggctgggccccggtgactccccaggagtgcctccagctctgggcttctgcagcatttcattcctccctcatggggcttgttggaatctgtgtgtccactgaatgggggtcatcatttcaaccacagcacccaagcacctcctcagcagggagctgtctttgtgcaggatgatgctggatacgctgctctgcactcagcgggagaggcaggtgctgctgggcgggtgctgcagggtggcaggtgccgctgggcaggtgcacaggccccctcctcagagcccggcatgctggccctgccagaaggatgccaggaagcaagaagtgggggcacagaaacgtgtggctgtggacaggcagagaggagtgcgagggcgttctaggtgagcaaaggctggaagcagaaatgtgctggtgatgagaggcccatggacatgccggggaggagggctgagtggaaagggcttggacaccaggctgggaggtagaggaaggagaaaaaaatgggcctggattggcctgaagctagagagactgggagaggcagagaaaaggaagcagcgataggggcgaagagtaatggaaatggaggcagaagagagactccgagaggaaagacaggaaggggcaaccgaagaacaggcagagaagaaaatgcgggtccagggcagggaggggcgaggaggccacttgcacttctgctgaggggtgcctactctcctccctggccacactcgcacctcctggaaaccctctaggtcccagccatggctcttgatatcccctgagcccaggaccaagatactatgctgcagccttccctctctagggctgccaagtcgacagccttctccaggtcctggatagtggctgggggtccctgggaggcaggtccggcctggggagggggcggtgccgggaggctgctgtctgtgccacagaggtcactaagaggctccctgctgtgtgacagtggccccagatcattggagtacagtgccgcaggccctcccagcctgaccttctgggagaccccagggcgtgccggaggtctggatagtctccctgtcctgggtccagggccaggcccgggactgagagctccgcacagtgaggcgcgcaccacttgagcccagcagcctggggaatggacctcgcctctccctcgagcgctgggaggggcgggtaaggcctaacaatgtgaccatctgcttcacccctttccactctctggctcctcctctgtaaacgagctccacaacattccagaccgcacgccaaatcggaaaactctggactcacaaccacgggcttaaatgcctaattaagctcattctttgaaccaagccatatttgaatgcatctgtcagccctcctccagctcgcctcgcagcggggtgggacagcgctaacgggagtgggagaggcagcgcagcctggcagacaggcccctgagccgtccccagcctttcctggtccccgatctgccctggtggggctgttcgaacgcttggtccctgaggttttacagtcaccagattcatctgtagcctttgctcctgggcctgcagtgaacccctcggctccccacctccctgtccccgtccctggaaggcttggcgggcacctgcctcggcttcagactcctctggtgcagcacctgccaagcccaggccctgccttgctggggaagctccgtgtagctgaggcctgcgtcagtttcctctatcccggaccagagatggatgctccctcccttctcagcaccctccattcaaaccatttgtggcagccgcgccacaccagagggtgcaggtcgcagcccagtgctctgaagagggggccacggggagccaggagaccacaggcgtgggttctgagcccacgtccgctgctgcctccccgggtcccggcatcaattccccacccgctcacctccctgagcctgcaacaagaggatgtggatgaacagtgttccactgtgtgtgtatattaataccacgttttatctatccgctcacctcttcatggtcattctcggcagcaaggatgtttagagaatgttatgctaagtgaaaaaagccaggaacagaaagacaaatagctcatgatctcactcatgtgggagctgaaaaagtcgatcgcatagaagtagcgagttgggtgctgtggctcatacctgtaaccgcagcactttgcgaggtcgaggtaggaggtcccttgagcccaggatttcgagaccagcctgggcagcatagtgggaccccgtctctacaaaaagttttgtttttttttttaatttgctggtagtggtgggatgcatgcctgtagtcacagctactggggaggccaaggcgggacgatcgctggagcccgggagttggaggctgcaatgagccatgatcacaccactgcactccaacctgggtgaccaagaaagaccttgtctctaatgaaaaaaaaaaaagaacagggtagaatagtgatgaccagaagcagggaagggtgggaggacagccagagatggcttaatggctatagaactacatctagacaggaggaataagttctagtgttctataacactgtaagatgactatcattaacacaatgtattgtatattttcaaatagctgcaagaacgaattttgaatgttcccaacccaaagaaataataaatgtttgaggtgatggatatgctaattaccctgatttgattattacacatttctacatgtattaaaatatcactgtacctaatgaatgtgtagaattattatggtcaactaaaaataataataaatgcaaaaaaaaaggatgtgaggaataactccactcacggccctccctggggtgcacctcctccgtgtacctgaccacacatcaggggaaggcacagagctgggacagaagcccagaggtgtcctgtcacccccctgctgcaggctgtcagcccctcctcatcacttgcagggcccagacaaggcagcccacccgccacaggtgatgggacccccagccacccctccggccccccaaccctgtgcccctctccccagcacccctctggttctgatgcgacaagccttctacaggaccagtggccacactgctcccaccctggccctcacactctctgccttctcttccagaaatgcttgccccttcctccttgttacctggctcccccgatcccttaggcctcccctaatcctcaactggcacccccagcccctgtgtggccccttccatcctggcacttgtctctcctgctgacctgggagctccaaagcagcaaggacctcagctgtctccctccctgatcctcaggttcccagcacccagggctgggccaggcttcagctgagtgctctgctgttacctgtagagtgagtgggtgggtggactttataaccatggcccaccagccttgacctttcatacagtttgacagacctcttgctgccccaggcagccccatggccctgaaggcaagggtacccctgtagcacatcccagggacagagccagactctactacctccaccccctgcaacaccattttctttcctgcccttccctgttgcaagcatattcaaatgtttaaattctgtttggggaacaattagcctgacatatggtctcatcacgttttgtcttccgatggaaaaatccaggggaaacttggaaaatgatgactggcgaggctttaacgtgtttttgctttttttgatggtcacaagcaagccacagatgaaaagcctgttaccatctggtccaaccctctcatctgactcagggggaaactgaggcccagtgagaagaaggtaccagcctaaggtctcccagatgcaaaatccagagcccttggcacttgcctctccgcctcaataaccttcagagagttggacctaatctttgcagtggggtggtggaaagaggggcttttagggccaacatgctcgagttctgtcctcgagattgtgtggctggaaggcttcatacccctggaccataagaggatggcagaatggggaggacctgcagttccctgtctagacccctctttggtatccccatcaggcaatggcttggccaaccaggcccccgcttcactgcccagtgacgtccagaccttgttgccatccaccctgcagctcctaaggatccagacggcatctgccaagaagatacagcaagcctgcctggaatcagaacccactcctgtgactgccagaaagagcccactccctgcatcttgccccgctgggcctcatctttcctggggatgggggtgaaatacccagccactttctggcccctagaggcccgatgtgcacatagacgggctggatgacatgtgcctgggctcacttatggagcatctgtcccctccctcaccacaatatcaaatcccgcaagcagaagcaggaggaagtctgtctctgcctgcgtgtggtagctggcacatccctggtgctccatgctgtgggtgcccggccactcgcctctacaaggacagtgctgtatgctgacaaagcttttccattctgcataatggttttgtttggtttttgttgttgttcacaagaacccaggcaggtatgattattatcatgctgactttgtgaatgagacaacggagactcagagagtgaaggcgacacattcagtaaggggcagggccaggatgtcccctgtgtcataggctctagggagctcaggcactcctagaggggagatgtgaaggcatctccctgggctggagctgaatgaggataattcccctccctttgttctgcaaggagtggagtccctggagctacatccagtgccatggtccagaaagggcagacctgtagccaagagatgtcccccaagcaccgtcacatgcctgaggtcctgaggatgctgtggaggggccaccctcagtgcacgcctgagccgacactgcagagcctggctgtgtagaggttcccaggaaggacctccagcaagggcagggctagatcccgcctgcccacagggaaggagaagcacaggtggggagagcacaggtgctctttccctcccgatgtatcagctgggggcctagcgcacaggccttctgccaggagtggaggctgcatgggcattctgcaggccaccccgtccccccagaagccccaccacagacagccacatgttgagcctccagctgacagggcacagctctgacaacagtgagcagctgggggaccacactcgttagctcccatttaggagaaaaggcatgccttgtccttcctccctgagctgggctcctgcagggcctggccggtggcagttaaagcatccggacgctttcggactccctgccgcaggaggggctgcccggccagggctagcgggtgaccatgctgtgctgagcgcccacagaaagggctgggccctacagactaatccattgtaggggcatggatgggagtcgggaggctcctgttgctacaaaatgacagtccatccatccaatgttcactgctgccagctctgtgggcccccaagagccacacggtctctgacctggggagcacacagggaagagaagccagcccagaggtagatggcttagcctgtacatgtggcccatggagggcctggtaggcttcctagaagaggcatctgacatctgggtcttgaaggatgaataggagtttgcttccaagggcggatgggagagaaatagtccagacagaaagcacaggccatgtccagtcacagagctagaattcttcaaacccaggtctctctgctgtcaaagctggtactcttagaagctgcattctgctgcttgatgcagggggagctgcaaacaccaagccaagacttggagaagggcctaggaacgggcgcattcaggtgttgtcttcatccatttcggctgccataacaaaaataccagagactaggagagacttgtaaacaacagaagtttattgctcacacctggaggctgggaagtctaatatcaaggccccagcagatttggtattgcatgagggccccccacttcctcacagatggccatcttctcactctaacaaaacagcaaggaatctctcaggcctcttcaaaaatggcattaatccgtcaatcccattcatgagggctcctccccagtggcctaatcaccccccaattctccacctcctaaaaccatcaccttaaggaccaggatgtcagattgttttgttttagagacagagtcttgccctgtcacccagactggagtgcagtggcacagtcacagctcactgcagcctcaacctcctgggctcaaaggatcctcctgctcctgtgtgtaaatctcccacctgctgagagaagccagctccccaaaccacatgcacatcagactctatctccagattccatgtgaaatccaccaaacgtgggccacccaggcggtggagcaccgaaggagacacacatgaggaagacacaggaaggggctctgtgtcacctgggactggctctgggaggatgctgcagcattggctctcagggacacagagcaggcagggacaccctctgggacagggacaggacagttagagtgtggaaagatggggagggcagaggacacaccacacagaagtgtggtacaggcaaaggcatcgagagagaccctcccagggcaggaggggacagaaatggtccagacagaaagacagcctggagggagccagccacactgatgatgatggataacatctgtggaaggtttggaaacaggaaatgacaagagcaaaaaataaaaaataaaataaggaaaattaacctagccatggtacagtcagaaaactactaagtattccaggaaaaggttggagagagaagggtttctaaatttcattctcagaatctaaaataaaactgattttctggcctctgggagctctggagaagctctggaagttgcaggacctgtgcagtcaccacatcttccagctttccagccaggtcatcgctccccaagtcccaaattgtgtgactgtgaccacgatggtctcaaggtgaggggcaatcagaagggctttcaaagacatgaggtgtgggctcagaggcatgcaccaactcatacatgccaactcatacacacacacacacacgcactcacacacatgcgcacacacgcacacacatgcactctcacgcacacacacacatacacatacacatacgcatacacagcagctcagcggtggtgcacattttctgttatcaaaggagacaacaaagaggggtcatgaaatgcagccagcagatggaagcccgctaaaatgtcagccagaagaaatagcccacgtcagaaaaacaaaattccagtttagcaaaatccttccctcctcccccactcctcagagaaaatttcccgtggaggcccctggaactttggcaatccaagaagagttatttattctggaccgccgcgccgctgtgcatgttaagtacaaaaaggaaaaatgctttcggatttggaaatggggttgcagtcgcagatggtgcctgaacatgcataaattcggtgactgcgtgaacagatggaaacttgaaggggaaaaaaaaaattaaaaaaaaacaacctagcatttatctgccaggccactgcggagctggagaaggggaatctgtcacttgactaggagggtctcggtcttccaatctgtgggatgggggtaagaaaccaccatactcaatggtcattcccagctgagtttcagccctgtctctgccactgaggagctgggggacctggccccttacttaacctacttcttcatgtgaccccggggataatgcagatgacctggcagggttgttgtgagaattgcctgaagtcatccatgcataggacctatctgtacctagccagggcgacagccccatgagtggggcctcacttgccagataaagcccggagtagcccagagaggaagatggagcaccctgaaagctccactggtcggtcccacaggagaggggctggggagagagagagaggaaatagagacggactcctcccagcttcccctttccagaaggtttctgggctctgggcaagagctgcacaggcatgctgttcaggagaagccgacggtaggccaggctgcaagggctgtgccaagaaagggtctgtgggcaggttcagtgggaacgtaggaagaatgaagataacttagaaggagggttctttctctttttgtttttgagacaggggctccctctgtcacccaggctagagtgccggggtgcattcatggctcactgaagcctcaacctcctgggctcaagatcctcccacatccgtgcaccaacacacctggtgatatgggtcagactttgtgtccccaccaaatctcatcttaaattgtaatccccaggtgttgagggaaagacctggtgggacgtgtttggatcatgggggtggttcccccatgctgtcctcatgatagagagtgatttctcatgagatttgatggttttataaggggctcttaccctttcacttcctacacatcctctctcacctaccgccacgtaagacgtgcctgcttccccttccgccacgatcataaatttcctgaggcctttcctgccatgaggaactgtgagtcagttaaacctcttttcttataaattacccagtctcaggcagttcttcatagcagtgtgaaaatggactaatacacttgggtaattttcttttaattttttgtagggacaaggtctcgttacgttacctaggctggtctcgaactcctggcctcaagcaattctcccacctcggccttccgaagtgctgggatctcaggtgtgagccaccatgctcagagccaaagggaaggttctatccagggtgcccagagattcttagcaagtcagtcctcagattctgctccacactggggagtccacatggtacggtgaattgactgcaaaaaaaatagccacagttctccacccctccctgcctccaggcccccaaggacattttgcagctactccctgaggaggtggcatctacttctccaacctagcagggtgacctgctgtggctgacagaacccagtggcagtgagtgtgtgtgccaatgcgaggctgagctgccactctctttggcgcttctacttccaccaggaggacaggcccaggttggcctgctggaggaggagatgcgtggagcagagccacactggccccaggggcccagccaagggccctaggtggaagaagatcccacagccaccttgccaacccgcagacaaccacaggcccatgagtgagccctgccgggcctggctcagatccgtagagccacaaatgacccactgttgcacagggaaaaaaaaacacatgtttacaattgcatgtcaccaggtctcagtggtttttatgcagcgattttgtgacaactgacactgacctaccttctttcaccacactcccactccaaagcaatttctggctctggagagaatgggggttggggagagtctcagcacaaacccagaactacagttcaaaactcagaaactatgattcagaggcaaagggctccctccccatagaccatggcaacagctccaccactaagggccaagtcaccagattgtctgagagtccctctgcttgcaccactagtttccctgatgaaaggcagaaacgccagccatctctgaccgaggccatctctgcatagggagcttctggccctcagctgtggggctggcactgcagagagggcatccccacccctgcacgtgcccacacaggtgaaagaaagcctgagcagctgcccccagcacaggctggaaaccctggagctagtcaggaaggcagccccagcagaactctccccggcccccagtggatgcctccagggaaaccctcccaccagccccacacagcctcacagaggcacagatcctggattgttttagctccatgcagcccagcagggttctatctaacacttccctgagtaatcataacctgccaaggtgatggggcatgtgcccatcggggtggccgtggcaggcagcgtggtgagctctgtgatgcagagtcagggatctgagctccacctgcccctagtcctgggcagacccctggaccagcctccaagttcatctgaggcctgagtgctgcagaggatggtcccaggggagagagcctcagcaagaaagaaggagtctggccgggcacagtggctcatgcctataatcctggcactttgggaggccaaagcaggtgaatcacttgaggccaggagttcgagaccagcctggccaacatggtgaaacccagtctctacaaaaaacagaaaaattcaccaggcatggtagcacatgcttataatctcagctactcaggaggctgaggcatgagagtctcttgaacctgggaggtggaggttgcagtgagccgagatggcgccgctacactccagcctggaaaaaaagaaaggaaaaaagaaggagttgtcttctcctcccacccatctctgcttctaaaactgcccatagcttgtctcatttgaaaacacttcctggagaatcatccctcaattttcattaattatgaatgtaactttcctcttactaaattcaactttcttttttccagttgctgtaaagtctcattcctcagagccatccagggtgctctcctgggcacagtcacctctgtctggaatgcctttccctacttttctatcctgcaaactcctgcaaatccttcaagacctaccccttttccatgaagtcttccatgatttccctgaacagtgttaatggcaccatcttctgggctttctgaaacccaggctgtgtattaatatctccatgggttctgaccacagatcagcaaactgtggctcaaaggccaaatccaactcacctctcatttggcaaataaagtttaattgaaacagagccaagcctattcatttacttattgactatggctaccatcagactacaatactgatagagacgatatggcccaaaaagccaaaaatatgtgctatctagtcctttacataagtatttttgtgcactgagccctgcccgagactgtgctcctctctggggctaggacaagcaagagggccgcttgccctctggaagaaagcttgctgaattaatgattggatgaatgagtgagtgatggagaagcccatgttttcaattcaatgcacaattcactgggccagtgtttccagagggccccgcggaactctgcatggaccaccgcatgcatcagggtttcagtgtatactgtccgccctccacgcccatgcattctgcatctgcagattcaaaaatatcaaaaatctttgggaaaaatcaataaaagcaatacaaaaattaaaaataatacaatttttaaaataccacgtaatactttgaacgtagcatttgcattgtattaggtatcataagtaatctagagatgatttaaagcacttgacaagatgtgtgtaggctatgtgcaaatgcaagccattttacatcacagatttgagcatccttggatttggggaaccaaagcaggtcctggaacctatgtcctgtggatgcccagggatgaccaaaagaaggtgttacaggcttcaaggcgtatgggcaacctgatatgctggacagcgccctgcaccacatctcagctcatccttttgctccagcagttgcaggagaaaccagaaggaggtgctggcagtgcctctgtggcaatccacgtggctttctctgcttttgcctctgggataccccggatacccaggaagccactcagccatctggtgcatatccaccctaggaagtgcaggggagttaaaatccacagcgactccagtgggcaattctgatgcatgttctacacgctgccccagagggtctccagtcacccaccatggtctccctccacccctcttcacctttcctgagggtgcactcctgcttcccgggaacatatcccccaaattaactatctacacacaagccattgtctcaggctctgcttcggctcggggtatgggatatcagtctccagcacctgggtttaacctggtctaaaccttacggcgggacttgtcagcatcttctgtatctttaatactctgtcaatctccagcaaggacatctggtaaatctgtttcctggggctgcagcaacaaagtgccacacgccaggtggcttacaacagcaattcatcctctcgcagttctggagccaagaagtccaagatcaaggcgtccacaggtccacgctccctctgaaagctctaagggagggaggccctctctgacacttgtcaatctccctctcattcctcttctgacaccactaattggatttgtgcccccccaatccagaatgatctcatctgcagatcatttatttaattacatttgcaaaaaccttatttccaagaaaggtcctatttataagtaccaggagttgggacttcgaaattcttctggaggaacactagtctgcacaggacgttcagtgagtggcatttcttacacttctttgatggtaaaacttttttatccaccagagtacctctcaggactggtgctcttcaggaaaatgtgtgttcaccagtattccccaagaggacgaaggccacctctgtcctgtccaatgctgcagcccaggacctggcgtggtacctgtcatagacactgtgccagcaagcaggctgggagcaagctgcccagacagggagaagctgggagagaaatctcagcacaggagcaagagggacacccaggaggctcatccatggtcccttgagagctcctgggctgcctatctggagctccagagagcgggctggactgagagctgagccagccccgggctggcctccccgcttccctgcgggcagagcctcctccagccacagcctggctgctggcaccagtgccttcctgcctcggggaatgcctggttagccctgactgggaattcaatgggggcctgcaccaagccctccactccattaagctccccactccaccaagccctctactcaaccaagccctccactccacttcctgaacactcagagagtctgatggggacaaaccaggtgctctgaggcacccttggcagacaggcatgaaggattagaaacctctcctaaggtacactcacacctagccagacacacctctctgtggggccagactgttcttgaagcagccctctaggggcgcttgcagagggagtggggcactgtccacacctctcccaacccgaggagctcccaatccttgccttctgggtaggtatcagcacaacttcaacctgtgggaggccccagttctccattaacgcactaggaccaccttccaaaggccagaagccagtgccgctggcacttggcttgtgtttctcttgaggtttggaatgaagctgtccatgaacttttaaaatggctgctgggcagtgagcccccaggctgcaggtgctgggccttctagagctccgaaacctccgcgtcaggggccaaccccttcagcaagttgcttctgcagcagtgagtaacacacctgcacacggaccagcttcctcccagggcccttcctatggaggccactccagaatcccttctcctcgtctgaccctctggaccctggacttccactgcagcctcccccaatttctgtggcctccaaaaagcaaaccctccaaagagaggtgcccccactctaacaatacactgagttggacaaggcagtgctggtgagcccaagaccctccccagggggtgcggtccctgcagggtctcattaggtgttagtggtgtccccggggagggtctcaccctcccctcgcctcctccagccgctgaccagcacagggccccacatacaggagcttagagcgggtttgctgactcattggaaggcaaccagcaggtagggtttccaggctctgcctcaggaggcagcctgagatggacctaccagtcatcttcatgggcagagcagaagtgcagaggaagcaggcatttgtatttgatcaggtttttattcctggctcagcctgcaaacagtaaacatttcattgcttgtctcacaattacattaaaaggtagataaaccccttctagcttacatttggcatttcagcctctaatccaacaaatcgccctttatcccctctttcatacgcacgtgcgcacacagtcggggctctgtgaccggcagggagctcccgcctcccatcttcagcagagcagcccggctcccggcttcagggccacacacagcagggccccagctctggccaggctcttacttgcaggacttctcaggaccttcgtatcctatagcagcttttcctaaatgccctggattgtaaaaggcccagcccacatgagtcagtaaaggaggagacaagtagggccccatctgctgcagccaggaccggtggcgcccattgtgtcatgtctgtcccaccctcgtgagcagcagagccagagctgagcacagcctggggtcgtgtcaccaggtccaggtgctccccagggaggtctggggctggggaaagccctgagccactgtggaggggaggggcccgggctggaagcagaacatcttctttctgaacccgctggggcctgcagcactgtgtgagctcaacccagctctcaactgcctctgggccttctctcgcatctccaggtacacaagcacagcatggatcacatctggggccgcatccagccacttgattccttgggaagcaaccccacagtccttcaagcacactccctgttcccaggagaagctgcacatggtgaggccaccatagcctgctggtggcagcctgttggccctgacccataccaggctgcccgtgccaggcagcccatgccagctcagggctcccttctccctgccctacagctcacaaacccaggccttgattctcttcccctaaaggcaaggaccctctcttcccagtgcctctccctctgcccttcctgtgtctggccttccccagaataccagttcaaagccagggaaatctaggctcctgtggccacatgtgccagaggcgacatacgcccagctttgggggcctatgtgctccaggaacatgcatatccaggaaggcagtcagcatccacctgccccacactcctcccttgatctgggggtaacttccctctccaaatgaggggtgcttttggagacttcccaccatcatccccaaaagccctgtgacctgagccaaaccagttaggctccttccctgaaacttttcccaccggaactagggaagagaggccacccatcactcctgagggggtggggcaagtagctctcagaggtggtatgcattaaagagagagacacggagcagggtggggaactgatccctgagatagcccgatgcttggtcccattgtccctggggctcagtggccctggccggtgcacccaagcttgcttacattgggtttggctgctgctggggagccccagttgctcctgtgacccacccccacccttctgcttccactcagtggcacagtgcagggaggaccctggggtagcggttgggtgtcactccaccaggaaaccccggtcacagcttgcccctcttgggcacagtttcccatctgtggcatgatcatattgccttgggtggtctcagtggctttccaaactcaaagggtggcggctcctggctcaggtgctgaacctgccctgctgtgtggccacaaggaagtagctcgacctctctgacgctctgcttcctcacctagggacttcgaataatatcacccctcccctcacagagtcagtaggacacaatgagctgggggttttcacacgcctagcacagtgcctggcacgtggtgagagctggttgtgggaagccatcatcatcccagcacctcaactcccacacacctgagcctaagacccccaggaacacgcagcacccactggctggggcctcctccttccccagtaaagagccacaccctgaactggggcttctgcctcataagtgaatacctatgacgatcctgatgaccccagtaatgacgcataagcatcacacacacacacacacacacacacacacacacaattcacatgcctgtacatagtctcacacacagtctcacacatgcacactcacacaagttcacacacatgcttacagatgcacattcccatacatccacatgcatccacatacatgtgcacacacatacacataacgggtacaattcacacatctgtacatggtctcaccatgctctcataattgacacatgctcatatgctcacacagatgccactcacatacttatacatgctcacacatgtgtacaaattcacatgtgcacacaatcacacagtgctgccacactcacactgacgcgcacacacactcatgcacaggaaaacatatacacacgtgccctctcaagtgggtgcaggcactgatcatcacataggtacacagtcatgcacacatgcacataccgagtgtgtgcacaccctcactcacacatacactcacgcacacctcccccggcctcctctccacccacactcacacatacactcacacacacctcccccggcctcgtctccacccacactcacacatacactcgcacacacctcctccggcctcgtctccacccacactcacacatacactcacacacacctcccccggcctcctctccacccacactcacgcatacactcacacacacctcccccggcctcctctccacccacactcacacacacctcccccagcctcctctccacccacactcacacatacactcacacacacctcccccggcctcatctccacccacactcacacatacactcacacgcaccttccccggcctcctctccacccacactcacacatacactcgcacacacctcccccggcctcgtctccacccacactcacacataaattctcacacacctcccccggcctcgtctccacccacactcacacatacgctcacacccacctgtcccagcctcctctccgctcagaacatattagctgtcttttcagcccaatcaacccactttttaagtccccagctggaaggggatggccatgatcagactgagaccttacatgccacgtctcagccctagagtttttatggcccagttttaaacctctgataatggaggtttatggtgccagtgcagacacggcctgggcaggggaacggtgagcggggctggagtggagacaggcagtgtgcagggcgagagcgagcgtgtcagtcccgccagcccatgactcacaggacgtgcagcattaggggaattatcagcgtcagccctgatgatttcctggccctcgtgtaaaaaccatcatatattttcctaatatctggtctcaatttcctctccaattaatggtatttccaacccataatacactgatttggctttccacttgtgctctctgaaagcacaaaagggtccacagacaccgactttctccatcacggggggctagagctgcccccaccttgcctttattgtttaaatcaccgctttatgaatcatcgatttctgattcttccagctacctgtggaagtgctagatgcactaagaagatgggaacaggaaggctcagtgtccccttctgaggggaaggcaggactccctaatccccagagcactgatttggtgcccaagagcagcccactggcgcaaggcagggcgctaaggtgatgatgtggctgagaagcatctccccgggcccgtgtcatcagaagagccaggctatcacacttcctctctagtgcaggtaccagaggaaactgtctaacgctggggccagagcacctagggaccagcaggggacataatttataggaagaaagcctgctcttcactgctgcagagctaccctgttgggttaagcattgccctactggttctgctttttaaagttccagagaagacccaggctgaccgttctggcacctggctgaggctgagtgcagggcagggtgggtgggtccctcggcagtgggaggacaggacagcaggagtaatgagactgcctgctcagacggcatctgccactcacagagactcagcctcctggcccacaggtgttggatccagcccgtcactggagcgatggagaaactgaggcctgtgggcctggggtcaaggccagagttggccaccacagggagtgatctggctaatccaggcccccccagctgccttcttcaggggtcacccaatccgcagagctgtgggccaagagacacctcctccaaggaagccctccagaccaccctttcagcaagccctgctgtcatggcctggcctggccacgtccttctagaccaggggtcacagacaaactgaagcaagccaggtccagcccagggaggtgtcgtttttgtcatgtgttttatttttaatttttggaattcagttttagaattagatttttacacacacactagattttcatcgtcccttgaaccattggagacccatgttcctgcaggaagcagggagacatctggctggaatgaggtggcagctgtgaccctgaccctcccaacccccaccacatatatatatacacacacacacacacacacacactcacacacagctcctggaatgtgactttttatgctgtggaaatgctcaacatgaccctgtgcatgattctgagctccaagagcagacgtcggtactgcaagcccgccctgccctgccagccttggtaagggaccccccagcactcagaggtgaccagtctttgacccctggctccaggaggagacagctggcctgttgctcaccctactgccaggctattctggaggtggcacagtgcccagcttcccacagacccatccctggggaccatgtttcctgagacccctgctctcccacccagaagcccagagcccagaaaaagaatgagggccacgaggccatggagagatccatgatccatctccttccctccctccctgacactcagcgtccactacacacttcggctttgcctcgtgaatgcctatgtgcaaaccaggcaggacacgggcacgtgctgccaatccaggaggtggcatgacatttctcatgtgcctagggagacatgaactggggagaatgggtcacagatgtccacccagaaaatcagaggctccactctacctggaaccccaatcctcctcactccaggcccagacctctggctctttgcagggactacctgtcacctgagaaatgtttctgagagaagtgatgccagatataaaagtatataagtgtatgcatgtgtgtgtgtgtgtgcatgcatgtgtgtgtgtgtgtgtgtgtacttttcctcagaagagggataatttgttggaaagtacagattcaaaataaagttctaaatatattagccagtcaaaaatcctggtagaaagcatttccttcctttcctatgtatggagcatttaggtttggagacatctcaaactccagcaccctcgcagaggtcagtcaagtggcagaaatgacaggagaggcagatgcagggcaagagggaggaatgaggtttgtgtcctcatgggactgcactcatcaagataaaatcccatgatgacacccagccagtcagggtgatggtgacaggccgttcatgtggcatatgttaccagcaccccctgacatggtttagctgtgtccccatccaaatctcattttgaactgtaactcaacaattcccatgtgtcatgggaggaacccggtgggaggtgattgaattatggtggtgggtctttcctgtgctgttctcgtgatagtgaatgagtctcatgagatctgatggttttaaaaaggggagtttcccttcacaagctctcttctcttgtctgccaccatgtgagatgtgcctttcatcttccaccatgattatgaggtctccccagccatgtggaactataagcccaataaacctctttcttttgtaaattgcccagtctcgggtatgtctttatcagcagcatgaaaacagactaatactcccccttactttatgagaaatgtacctactctggaggatgtaaactcagcatgttcctaggagaatgatttgtgaggataacatcttatggtgatgggaaaaggcattaaacaactgtgccacacagcctaggggagctgcccaaacacagaagggccaatgcagctccagagccaccggtctgggagccctggaatgggcttgatgtcctgttccactttgccccagggaccttggctagactcaagtcacctgattctgattgctgaactccatccccagccccaaccaggcaaggcagtgggtcctgaggggaagtcagagcaagccaggttggaagagggctatgccagacccaaaggaggatggggggcatggcaggcagtaattgttgcagtgtctcagaggggtcctaattgtggcttcccagaaagcaggcatacttgtcagggagctgggagatggcagagactcagccatggtttaaagccagaagccagagcaagggtggaggcagggcaacacttccaccgtctcttcccacttggtgctcacacctgagaagccaaggaccaagaagagtgcagagcttggggcaggccctgccctccctgcctagccagcacgtcctcctggtctccctgtgcacctaaccaccctctatatgacccatggccatctgtctcaatctgttcaggctattataacaaaatcccatatactgggtggcttaaacaacacctttttttctcacagttctggagactgggaagtccaagaccaaggcagagtcggtgtcttgagagggccctcttgctgattcatagatggccgtctcctcactgtgtcctcacatggtagaagagatgatggagctctctgagatctcttttataaggccactaatcccattcatgagaactccacactcatgacctgatcaaataccccatctcctaaaacaaatgccccacctcctaaaaccaaatgccccgcttcctaaagccatcaccttaggggttaggatttcagcatatacatttagggggagggacagaagaatgtagtccacagcctcatgtaagagggagcaatcatgagtcactgttctgcctagaaccctccaacgtgcccttgaatcctggtgtttgcagcactccaggcaccccctgcccacgacaggcacccagtgcagcctggctctccaaaacaccactgggcccctctacccactctctgcagcatctggggactgaggatcagccctcccaaatcagccaagaagatgtcctaccctcctgcctgcctttccctatcaccccagcctgctccccaagggaatgctttgaagcttaaaaggtactctcctctctgcctttaagaagagctttgaggcctgagctgccaccagaagttgctggcttgggtcttggggcatttgggaagctgtgcccctcactgtgcctacctcactctcagctccagccacactggcctccttggagtgcctctgaaaggccagaatccctcctgccgagaatcttggcacaacttgtactccacagcccccgatcctcttgcttgctcatggttctcagtcaggggatactggatgatgtctggaggcattcttgttgtcacacctgggggaatactattggcatctagagtgtggaggccagggatactataaacatcttacaatgcaagggcagcccccacaacaaagaatcattcagccccaaaagccaggagtgctgaagccaagaaaccctgtcccaggcccacgttctccaaggctgccttctagatcccagcaacaagcctgtctgtccccactccactttgcagccccacaaccagccaccccatctcacctggccacctgcacagtgggtggacactgaggactggagacacagacaaagcttcacaagggaagctcagcagctgccctggaaaggtctgaagtgggacacagtgggaggcagtgacagagacctggaggcagaaccaggcacctctggacagctagaaagggtcctggtgagggtggggaggatttggggagcctgacaaaggttcagacacccacacagccctcccccgacatgcaacagtgacagccgccagggcagagaagatgctcagagagaagatgctcagagagggaacagaacacaggcttgggctcccccaagatgcagacctgctgcctacctctgccttccacctgttctttaactctccaggcaaaggctcagctccccagggagccttctggcataaagaaatatatccattgaagaaaagaaaaaggaggaggaaaggagggagcaagaatgtcaccacctctaacctaccattttctacatgctttcatctttctgcttaattcagtgagtgtttgtggaacatctactataggcaattctctttgctaggtgttttggagggagatggccatgagaagaggagaaattaagtcagcttcatggtcagagacatttcctaaaggagatactacattgctgttgctgctgctgctgctgctgttgtttgttgttgttgttgttgttgttgttgttgttgttgttgttgttgttgtttagatcaggggtcccgaacccctgggccatggactggtaccagtctgtgaccacccgtggcctattgggaattgggccacacagtgagtgagcaaagcatcatctgtgtttacagccattccccatcgctggcattactgcctgagctccccctcctgtcagattagtggtggcattagatgctcataacagcgtgagccctattgtgaactgcacacacgagggatctaggttgcacactctttatgaaaatctaatgcctgatgatctgccactgtctcccatcaccccaagatgggaccgtctagttgcaggaaaacaagctcagggctcccactgattctacatgatggtaaattgtgtaattatttcattatatgttgcaaagtaataataacagaaataaagtgcacaataaatgtaatgcacttgaatcatccccaaaccatccccctcccctggtctgtggaaaaactgtcttccatgaaaccggtccccagtgccaaatagattagggaccactggtgtagattatctctgtgtcttacactgttctaagtgcatcacatttgttaactcattctatcctttcaacaaccctaatagtgggtactactattattctcattttacacataagaaaacagaagcacagagaaggtaagtgactttcccaaggtcacgcagctgttgagtggtggaacctggatttggactgaggcactctgtctggttccagagcccaggcccctcccaccatgccctgctgacccttagaatctggcatttgagctttatcttgaaggatggttaggattgtacagatggagcccagtttgccagagagagaaagagagtgagaatgcagagagcagagccggtgtaggtaagggtttccagatgggaaagtgaactgtggttacaccagaggcggaggcagaggactgagctctcttggggagtagcgaagacctgtcctgcttgcgctgtcggtaatgaggctctctgggctcagggctgattataaactctacatacaagaccccattctcccatccctggtttaccagtggttcctgccaccagtaacggtcacacggtcacagcagtgacacattacatgcaagtgctctgcccagttcctcccctgaatcctcacaacagctcagccatgtgggtgctgtacaagcaaggaaactgaggctcaggcaggaagaaacatgtccccatcacacagctagtgcaacgcttggccagggcacttgccttgtcctcccaggttgcagagcctggtgctcccaagtttgctgctgaaccttcctctatcctccccaccaccaaggtctcccctctcctcactccttccccccaaccgccccctgcctgtgcccactccaccccccagagcacacgcagcctggcgactgctcacacagcctctcacaggcttaatagctccagcctgtagaaatggaacaaactgatggccatgtgcatcacttttatgtgcttataagagagtcataattaatttcccaaatgcacacaggactcaggggatagacagaatgctattcacagattgcacgatcgtttgacagttttaggcaaatgaggagcgagtattatttgcttttctaacgactgcctggtgcattttggtcttgatgatggcatttccaaagcaatttcagaaacagattagagaagtaacatttttaatctttagcaaaaacctaagatgtgagggagattgtaatgtctgttttttcagcacgatgttttctagcgttagggcaaaatgtagcacaaaatgaaacaacatcacttactgtgtaaacagttacattatctccaattactcttcagctatgcactaccccacccctctcaaaagaacaaaaaagagagcccccttatttccctgttccaggggcctgaatcatcactgcagctgccctgaagaccataacccaccaggaacagggaaaaccccctacccgactctcgccgcctgaattccactgttagaatgcacttctccagcaatgcaaatcctccaggaacagtggtcactttcctgcaaaaaataccagcacttaacttggtggaaaaggaggaagaatccagaaaacagcctgaaagtacagaaaggggacacagtattagcatcatgggagggaaggacgggcaacgtggcgcaggggtagcaggtgcaggaatgacagttatcgggctgagggtgggcagagcagtaggagaggggaaggtgggaggtcagtgccacctccgacactgctgggctgcgctcactccctcccttggcattccccatccagccaacagcagcacctgcatctccaccaaagggcagtctctggtcacagggacacactaggtcagcggcctgagcacaacacagcaatggggcgctggagtgcacatctccaggagcagccctcagcacgtgatgagtgggagctggaggacaacacacagcttcctggccctgcaggtggaaacactccccagtgtgtgccaccccatctcccgggctgcccaggggctgagcctcagtggcctcagtggtgtcaatggcccacggcagtaacctgcttatcggcttctttcccttctctgtctcacttctcgtctcctctccctatgcttcctggaatcagctcccaagccaactccctgcaccgaaagtttcatcctggggtggagggcagcttcagcagaagacagcccctctcactggcccatcttgggtcacatgccatccctaggccaaatgccatgtccagagaggtagagcatggataggccagacctgggccccatgcctgccctggaccaagggatggggtcagacccacccgaaacacacagatgagtggaggaggggagttcccggggaaaggtcagggcctgttcccagaagagagaattctatggccagcaggctgagcagatgtcgacagcggcccgccatgagagggtccacacgggtcagcgaagcaccgtcttggagggcattcgggtggaattctagcagaggctgcactaagtcagtggttcagggcaccagaagtgagtgagctgggagtgaatgcctgtcccccgccgcccgccgtcaggggttacttggtgctggggctgaggggcagagccacgggaagtccaccccactatcccacagcacaactggctctgcctcaggaggctgggtggcttcctcgccccacccaagcttccatccaggcttagagatccatggtagggggcttgctacaccccaacttccggctcagtgtttctgtatcccaggctggaatgagggagcccacggagatggagagtgagctccctgagggatgatggtggcatctttctccaagggtcccacatcatctgatataggacagaacccgcagggtctcagagatgccattgtttatataacttgaccctcccagatgccaggagccctggggaagcctttcccaaaacgtatgcctcggagctcctagtttgacaaactggtatgtcctgatatggtgtgagtgtgtgtcccctccaaatctcatgttgaaatgtggcctccagtgttgcaggtgaggcctggtgggaggcgcttgggtcatggggcagatctcttatgaatggcttgggccaacccctcagtgatgagtgagctgtcgctctgagttcacatgagatctggttgtttaaagcgtgtggcatctccccttgctctctctggctccctctctcaccatgagagactcctgctccccctccacctcccgccatgagtaaaagcttcctgaggcctcaccagaagtcagatgctggcaccatccttctcgtccagcctgcggaactgcgagccaaataaacctcttttctttataaactgcccagtctcaggtgttcctttatagcaacacaagacaacacaagaatggctgaatacagttcccatacagggctgggttgggcaaaaggggatggtgtgattctcccattaagaaaaagtgggacagggtggattgaatcaagttgaacaggtgtctatggcagggcctctcagggtcttcattgcatgatattgctatgacttgccagaaagagccatcacatgcggcgtttcccagactttgctcagaaagtctcagaagtgtgggtcaaggatcctcatgtcggaaaatgctaaaccagcaaggccagtgcccattccctaggagcagccaggccacaggtcccattccagacactctgccaaacagccccacctaggttcctcacacacacctgccaccacccacccccaaatctaacatgaagtacaaccaagctaagccagcaaagtccagtgcagcttgttaagccactccaggctagacacagcaaagcctcgtgttgtcattgtgctgaataggtcttcagactttccagtatacagtgtgacaataatgaagagacttctgtggctgagtgtggggtcctcataaccctgaatgcattttcatgtcagtgatggtcagtggtaaacatctcctgccattagctggatgagacaccttattacaaaaattgcagcagaatcttcattgttttctatttccactattacaaaattcattttaagagatgtttgtctttctttttgctttttgatgtgcagcacagttgtctaatagctcatctcatctctgataagacgtcatcctcacgtaatcattcttccaggatcctgctggttttacatcctcttacagtaggtacatttctcgcaaattaagtgccggtaatatatgtctacctgtctagtggtgtcaccataaacagcctgtaaccgtcgccccaacactccccagggacacactaaactgactgtatgtcaccatggtgttttgtcttgatgagtacacattttaaaagtccatgtcctagcaagaagaggactaaacatagagactttccccctcgaggcaacataccctgtgaaaatctgctcagcgatgtttgaatatctcattgaggctcccacatttgcagctcaaggctagatgctgctttacctcttctgaatcagatggaagaggctgagtttggtccctttggaacccaagtgaagataatcactcagccctgcaaataagcagagaatttaccagcccacagccatgttcaccagcctgcttccgtcactcatgcgtacaagatactttgccatttgaacaactcttttgtatctagtatttaattttatcctcatcatgggtctgtggtatagaggagaaaacccacattcagggacgggtaagttttgctcaagggcgtgaggtgcaagcagcagtaggagagacagaattctcgggcagtgttcttccacttcctctccacttcctcacgtgtccttgatgaaaaatcaagctgggctctgggacgggtgagacagagttgggtctgcgggaggactttcccagcagtgagtggggcctaggggcttggaggcagccacatcacgatgtggatccagacaggggcgccccctctctcccctcacacctctctccctctctctctctttctgtctctctgtctgtgtgtgtgcacacgcacatgcatgcacgcgtgcatgtgtgtctgtctcctaaattgctaaatcgtctttctctgcttttccaaatctcccatctgattatccctcttttcttctcccaacctctccctaggagccaaatgaaggtgacagtaagctcaagcccagcctgtcctggcctagcctgagggcctctgctaaggtggaccccaaccagctccagcccagtgaccccaaggaagactctacctgcccagccaaacctaggccaccagtcaccccacccaggccagctcagtaccgcctccacaaagctcccgtgatgccctctccagggcagtggcacctccttccagtcctctctgcctctgtttcccacccacccccctacatccccctctgacctgggcactccatgggacagcttgcatgtcactcccctctcacagagctgggtgcagagaagaacatggtgggcgcctttgctgagcaagaacaatgggttgcaccgtgcagcctcacccacctcacccacatccccagccccaggtgccacggtagggactgaagcgttgacagccttaccaccaggcacagccagctcccagccaggcacagtccctgccccagaatccatggagggcagctcccttcccatgcccctcctatcattccaggacgttaaaaggcacaggtgactctgagccctgcttcctgctgtgtgctgcaaatcagttgatccaggaggcttgtcatgcccccatccctctctccaaagagaaaagaaacctctctgccctgggggcagccagatacctctacaaggcccagacaaggggagctgaggtcaggctcaaacacctggggcctgcagcatatcatgaactgcacagcgtctgcccactctaggccctctccatcggcacacgattcagacccagagctggtggcacatgtgccccccgacccatctgcaagggctgctccaagtcctgcagaccatttagccacacctcagccagtttctcaaaatccttctgggcatagcgggggctcagcactctctgcagggcacagacccacccagagccagtccttcctgaacccgggctgacggccctctgcctccaccaccccaatcgcagggctctgccatgcttgctttctggcctgcagaattcccagttccagcagcaggggctccttctccctctccccagtttgggagaccccagagtaaggaaggaggtcttacggtctggcccatgccactcccagcagtcacgttgtttagggtgtcaaggatcctggttggctttgaagccaggcaaacctgagtgtgaattctccctttcagctacatgaccttgggcaagccctctccccatgaatctcagtcaccccatctgtaaaatggtcagagtatctacttcctgacctcgctagaaatcgaggtaccactggcaagtgtcaggcccacaggaggggctcacaagggccagctccctgtccagcctcctcaaagcagcctctttctccttctccagggtcagggccactgccctgagtgtggacctgctcttgtccttgcagctcagcccttgtaccacccaaccccaagccatgctcagtgctgggtgatgtaattgtcctggaggaggggcactgatccagccacgcactcacccccatctgagccacgttagaagcactgcccataggggtccttaaagaagtgacctagagtctctaattagcaccaaactcccattttcaccctaatgagcttccagcaccacaccaacccaccacattgcagtgtgagaggagacctttggatgctgtcggtccaagccctttccccatgcccgggctgcttttctggcttcatcactagcccagcccctgccctaagcccgtcctctgccataccaggctccctgtcatgtgctgtgctgctcctcaccttcacacctgtgattgtgctgagccctgtgtgtagaatgcccttcccttccctcgccccctggtgagtcctcgtcactccttttcatcctgtccaatagggagccataagtcacatgtgatgagtgagcagttgaaacgtggccaatacaaattaaggcttgctgtttatgtagaacgtccatcagacttcaaaggctgaagacagaacaaagaatgtgaactatctcattcataaatgttttgcaagccgggcacggtggctcacacctgtagtcccagcacttgggaggcagaggtgggcgactcagccaaggtcaagagttcaagaccagccttgccaacatagtgaaaccctatctctactaaaaatacaaaaattagcccggtatggtggtgcgtgcctgtaatcccagctactcgggaggctgaggcacaagaatcgcttgaacccggcaggtggaggttgcagtgagccaagatctcaccactgtactccagcctgggagacagagtgagactctgtctcaaaaaaaaaattaattaattaattaattaatgctttgtagccaggcacagtgttcatgcctgcagtcccaatgctttaggaggccaaggcaggggggtttcttgaggccagaagtttgccccacctgggcaacacggcaagactccaccactgaaaaaagtttaaaaatgatccagatgtggcagggcacacctgtagtcttagctactcaggaagctgatgtgggaggatcccttgagcccaggtgttcgaggctacagtgagccatgattgtgccacagcactccagcctggcaacagagcaagatcctgtcttttaaaataagaagaagaattttgtgctgattatacagtaaaataacattttttgctatattgggttaaggaaaatttcacctgtttctttctaacacagctactagaaaaggtaaaatcccacatgccatcggctgtatatttctactgattagtgctgccctagaaggccccactttaatatggtaagaaatggctctagagccctcagcaaggctggaccacgtgtacctgtggatcccactaggaatttggtcttcatgcagctgtaagccattggagggtgtctggggcacagaggctctcacagctcctggagtacaacagtcaagaaggaagatgaggctcctccctgccacagctaatgttctagtggagaaatcagacaactaactaagcaaatgagggaagcgatgtcagcccccagtcaaaggtcatgaagaacgaacctgggtgatgtggaacggagtgactggggaaccccttcactggggtgttcactggtggccctgctcttgtccctcagggacaagaggtcctctcagaggaagcggcatttaagctgagactaaatgaagacctggagccaactaaccaaaaagctgcacagagaagcagcaaacgactgcctggcagggagccgggagtgagaagtggatgtattaggactcaggagtgttttggatcaaagctgacagagctgacggactggctgggaacaagaggaactgcccctgaccttggcaagggggtcatgtctcaggaggagcagacatccagggacgctggggatcttctcgttatctggccatcagggtacctaggctcctgtcctttgtccactgacttgtggtgactttgggcaaacctttctgccctctgagttctcatctctaaaattgatgaagaaccttgctgggctcccttgcagcagggtcctgagaacaaaataaagcaatgcctgtggatgctccattcattctgcaccctggcaggccccagtagggctggggtggtagaaatgagcactggattgaaacgctggtttgtgggtctgaatggaaaccatgcacagcgcacaatgtggggtaagagaagagcttgaacaacagtactaggggggcctcctgaaaacagggcttctcacctgggcctagatgcctactcattgtcaagcagaaacgagaagaagatagcacaacgagaggcagtcacgacacacgcaaaaacatggagatgggatacggcaaacgtggaaaacagaccacagggcactcaccggcctcagtgaaacgcccagggagaaatgccatctacccaacctatgtgaccgccaggaaatcacagatgcatcctgggaagagcctctttcattgcccaagatggccccagactggccccaacactctccaagacagcgccaacagcttgtcggtaagggcagacagcaccaaacatgtagacgagaaatgtaaaatgagtaaacattattgaaaggggctgtgtaatgccatgaatttttcagtggtaaaaacagctgagaagttattaaaaaatgcatgactttcatatttgattataagtcaagagcggccaaaaagagagggggagagagcgcagggggtggaggaggggggatggcaaaagacaccagcagcccggcagactggaattaatgaggttgttcctaacagggaagaagtgacatggtgattagttaattactattcagccgcctgtaattaatgcacaactgaaattggtgtacaatgaattaaactaccacataaagctgctacccaaattgagccgaggaggctattactgcggcttcaccattgtgatttcaatagtgtctccctccgacaacgtgttatgcaactagtgggagagtggggctggagagatggagggcctgaggtagcgcgtgatcctgatgctcacactcagaggggcctcccgctggctctgactagtgtagggtctgggccccagcaaccagcccagggcctggtccggagaaagttctcaatgagtgtaaagaggtggagtggggatgactcgggaggcacgacagatgaatgggaatggagaagggaaggagaccggaccgctgctaagaaggaagataatcatctgtttacatcttttctctgaagataggcactgctgttatctcaggctccatgtcactcatgtcctccaccccaggaccactgcaaccaggacagtctactgcaccagtccaggcaccaggtaccccttccaacacattctgcacacagcagccttttacatcaagtcatgtcactccactgcttaaaacccacctgtggatttctactgtaatgagaagaccatttactctccctgccatgcacctacaaggcctggtgcaacctgctcccgacacctccccacctcacctctccctcacccctttaattagatgacccagccatgccatattggtctttctgtgccacaaaatctccaagttcaattccgccccaggacctttgcatgtgctgttccatctgattgaaactctccagcttttccaagggatgagacctcagctcaaatgtcaccttctgagaaaggcctgccctggcttccctgtctaaactagtccctcccctgtcaccattattctctcacatgaccctgagtctgtccttcctggtctacccgaagacaggggttgttatctccaggtatgctggatcttgctcatgctccatttctcatcacaacacaggctctatacaggagaaaagcatctgttctctccaagtgtacccagggtcctgcgactaattggaatgagaagagacaggcaggaaggaccccttggaagcccctttgtaggtgatggggcttgtggctcaggtctagagctgctggagaagttctgggactacctattgtcatatgctgtcattccccctcaccccaacaaatggatcccaagaagtagtaggctgagagtgtggcagaaaccatctggtataagtaagtgactgtggtggtcagagactggcaaacacccacacaggctttacaaccaggtggtctcagtctctgcccgggctgtgatggtggtctcctccacacccagagacactgcttcccttgggccttcctccccatcctccagatcctgggacactaaagtccacgtgcctcatcccatctcaggtggtgctgttgcctgtattgggccacctctgggccagtcacagggccagaaggatgaacgctctgattggctaggcctggggacctgcccacagggaggtggaagagtccaggcccctccaaaccacagcagctgagagagagggagggaaggagagagggggatgggggggagggagagagagagacggagggagagagacagagagggagagagagagagggagggagagagacagagagggagagagggagggagagggagggagagcgggacagacagggagagggaaggagggagaatgagagagggagggggagggagagagacagggagggatgggaggggagagggagagagggagggtgggagagaaagggaggggaagagagggagagaaggaggggagaaggggagggagagggggagggagagacagagggagggagggggaagagagaggagggatgggggagagagagagagagggagggaaggaaagaaaagagggaaggagagagggagggcgataaagggagggagaagggaagggaaggagagagagggagggagagggagggagaggtgaagggagaaagacagagaggaaagaagaaagggagaaagatgtagggagagagagaagaagggagagagagagggagacagggagggaaggagaaggggaaggagggaggggagagatggagggaggcaggagagagagagggaggcatggacaggagagagggagggagggagagagagagggaggggagaaacagggagagggagagagagtgggaaggagagggggagagagggagggagagagggagggaggggggagagagggaggcagggatggaggaaggggagagagggaaggagagagagagagggagagagaggaagagagaaagagggggagagagagagatggagggagagagaaggagaggggataatgggagggagagggggaggagaggaaaagaggggaggggggtgatgggagggagaaagggggtgagggagagagggaggggaggggagagagaggaagggagagagggagggaggggaagcatcaaaggagaaaggaacagaaacaatagatgcccactgccttagcggtgacagacccagaattatcatggaccagcttaacttcaaaatgcaaaattttatttccctttctctttagtcttgagatataaccttggaacaaactgcagaggccttttcccttaacctcaaaatagactccaggttggtccctttcccactgtagattcacatcacatttaccaaactgcatgctagtatctagtttggtgcttacttgggagttccccgggctaatctggagacaggtgtaccaagcctgtagacccagctgcagcatcccagtggttagctcaaggtgactagtcaacaccagccattgtttagatgatgccagcccatgctccaggtagacagagacccaatgagaggtgacaacgtgctggtggccctcgcttgctctcagcacctcctcagcctcgtgtctgctctggccatgcttgaggagcccttcagcctgccgctgcactgtgggagcccctctctgggctggttgaggccggagccagttagctttccgggaggtgaggagggagaggcgcaggtgggaagtgcgggaactggggctgcgcggctctcgggggccagcgtgagttccaggtgggcttgggcctggtgggcccgcactctgagcggccggccagcgccacccgccctgggcagtgaagtgcttagcacccgggccagcagctgcagagggggccccggatcccccagcactgttggcctgccggcgccacgctcaaattcttgccaggcttcagccgcctccccagggggcagggcttgggacctgcagcccaccatgcccgagccccgtgcggtgggctgccgcgtgactggagcctccctgacagacactgacccctgctccgtggcaccagtcccatctaccacccaagggctgaggagtgcaggtactctgcacaagactggcaggcagctccaccctcgctcggccccagcgcaggatccactaggcaaagctagctgggctcctgagtccagtggggacttggagaacttttatgtctagccggaggattgtatatgcaccaatcagcactctggcactctgtgtctagctggggttttgtggatgctccaatcagcactctgtatctagctaatccggtggggacttggagaacttttatgtctaactagaggattgtaaatgcaccaatcagcactctgtgtctagctgaaggtttgtaaatgcatcaatcagcaccctgtgtctagctcaaggtttgtaaatgcaccaatcagtgctctgtgtctagctaatctagtggggacttggagaacttttgtctagctagaggactgtaaatgcaccaatcagcactctgtgtctagctcagggattgtaaatacaccaatcagcaccctgtcaaaatggaccaatcagctctctgtaaaatggaccaatcagctctctgtaaaatggaccaatcagcaggatgtgggtggggtcagataagggaataaaagcaggctgcccgaggcagcagcggtaacctgctcactccagtcttttcccacactgtgaaagctttgttctttggctctttgcagtaaatcttgctgctgctcagtctttgggtttccactgcttttatgagctggaacactcacttcaaaagtctgcagttctactcttgaagccagccagaccactaacccaccagaagaaagaaattgtgaaaccgtccaaacgtcagaaggaacaaactctggacgcactgtctttaagaactgtaacactcaccacgagggtccatggctttgttcttgaagtcagtgagaccaagaacccaccaattacaccaagatagccaccaaaacaagacacacagaccttgcacccaggtcagcccctgcatgcctcccatgtcaggtttccctgtacaaatccttgccttctccccagaaatttgaagtggcgggctttggatgggaatccagccacttcccctttgctggttttggttaataaaagtcacttgcttactaacagaccccacccttgtcaagtgggctctgcaagcataaggggttagacctgcattccattacagaattgtttgcagggagtgagggaaggatagagctcatgagagacaggtcccctacagagcctggggtgctgtgtccttgatgaggaacggaagtcttgggtttgagtcccagccttccccacccacgatgattgcagcaagtcactcagcctctgtgcccactgggctggggctgtgggctcagctcgtaccaggggtcaccttgggcaccctcaggccaactgtgcccaggttcgcctttctgcatcagcaggcagagccactcatagcctccccccaaccctcatgcagagaaggaaggagccagctctattttccaaccaaatgctgcacatggacttctggagacatcccccatctcagtgcttggcccccatctcagaactgtaagagaaggcaagatcccaggacctgtcgggcagcagataaatgagcaggactgccaggcctccccgcctctactctggcattatgagaaggaagccatagctccctccccatcagccttaaagggaaataactgccgatcctaagcagaaacctcatggggtgggtggtggaggctttggaggtgtccacagtcctctcctgacttcagttctcccatctgtgaaatgggggcaagaattccggccacccgaggttatcctgaaatcacatttacctatggtgaggttacctatcccaccaagtgccccagtaactcgtggctgagagtgaaccagcccggggagggaagagtctcagggcctggtgcagggcaccccctggggaagcacggtgcccaccccccgtcccacaccaacctcgtttctgtcagtggctgccagggctctgcagagccagaacccatttcaggccagaatggtaacatttcccaagaaggagaaaattagattgtctctggatctgcctcctccaccccctccttccgaaagctccctggtgggcactgttgctctgcagggaggctgatccagactccacagacagttctcactgagcagcagcttaggcctgcagtacgtccctgcgtgatgaccgcgtggaaagcctgtgggcaaccagctgctggaggccccctgccttccctcccgcctctggaggggacctagaggccacactcctggaggagatgggattccttgccccacagattgaggactggggaccatgccctcatcctatctctgccgctaagctgctgtgcaaacttgaacacagctgttcacctctctgggtgccacattgggatgagccctggctcctgagcgagcagccccactgctgcctggaagtgaatgacccacgaacctgaaaggctctgggagctggccaagtgctgtcatcatagcccctgcccagtgggagggaatagatggtgacccccaagggacatgcagtggcccaaggacctggacgcacctgatatgaaggagaggaggagtcaatgccacagtgaggacctgggaggcaggcagactgggccaacctcgcccagcctgagagtggcctctgtgcaggaagcttccagttttctggagtacccaggccaggggtttaggacagagtcctctcatccctgcaggactgggtgccgtgggccacattgccagaatgccacattgccagactgaatcagaggctgcagtgagaggctcccagaggtccctcctggggagtggggaatgggctctctggaacgcccacgggctctcagaagagggctccaggggctcagagtgcgggggagttgcgggcatcctcaggggtgcagtggggagaggccacaggaccacagctgtgactcaaattgtattgtttgttattttttttagatataacatacctgcaatcaagtatctccagtgtctggctgaactaattttagcccaagaatccactgtgtaaccatcacccagatcaagacatagtgtatttccagcacccagaagtttccatcgggcctctctcccatcgctgacccaagtcactctcctgtcactgccaagctgaccactattctaacttctatcaccactgattaattttacctaattttgaactgcatttaaatggtgcttttttccccagcaaaatgtttttgagattctctgtgcagatgcacttatcagtaggttttcttttctgttttatttgctaagtcatatttcattgcatggttgtacccaattggtttagcctgctaatatgcactagatggttttcctattgggggtattatgaataaagctgctgtgaactcttgtttctgtcttcggtacacatagccattattccctgggtatatacctgggagtgccgtcaatgaggcataaggtgtatatgtgttcagctttgggaggaaacgccaaacagttttccaaaatggttgtgccacttctcatttccacttggaatgtcccaggtgcttcgtgtccccaccaatacttggtattgttcgtcttttattttagctgttctgataggcaatattttactgtggccttattttgcctttccctggtgattaatgatgtggaacttttttttaactagtggttgaccatttcttcattttcttttgtgaagtgcctgttcaagtcgtctgcccattttcttatagagtcccctatcctttctttgatttataggcattctttatatattgcagataccaacttctttatcaagtatatgtattttgaacatctcccagtctacggcttgctatttctctctgttttcctccttccttccctctttcttccttccttccttcccaccctcccccctccctccctccctccctgtctctctctctctctctctttctttctttaatttcaattttcattttagatgcaaggggtaccagtacaggcttttcacttgggtatattatgcgatgctgaggtttaggggatggttgattgcatcacccaggtggtgaacaagattcccgatgagtagtttttcagcccttgcctcccaccctctcctgcccctagtagttcctagtgtctacttttgtcatctttatgtccatgcttttccctctgtttatggtgtcctttgaagaacagaagctgctagttttaaggaagttaatggatcttttcttctatggctggtgctgtctgtttcctgtttaagggaatctttatgtttcccaagatgtgacctgcaatgtattccattcagtcagcaccgactgggcaaatcacctaccaggtgtttctgggctcgtccccaaacttccatgggtgaagaagtgtgctgctctgctcacattttgctctgaggaccctgctgagtgcagagtgggaaggcgaggcacagggtgaagtcccattatgaacaagcctgcagatgtgtgggaggtgaatcaagggggtcttgacaatgcctgtctacacgaatggttttggttttgttctttgttctttttagagacagggtctcattctgttgccaaggctggcgtgcaggggtatagtcataggtccctgcagcctctaactcctgggctcaagtgatcctcctgcctcagcctcctgagtagctaggactacagccaccatgcccagctaattttattttatttttctattttttgcagagacagggcctccttatgtttccaagactagccttgaactcctggcctcaagggatcctcgtacctcagcctccagaagtactgggattatggacatggggttctaaaggttctacagcaaatgacttgacttcccagtgttctggagtgctgtgttggttctctcccatccctacttctctccactctttgggaaggaggtggaagctgagaagaggctcctagagacagcaaatgtccaggttctgtgcagagttcctgagtcagcagatgtgggttagaggcttccagctctgccactcgccaaccttcttatgcctcagtctcctcacctttaacatgaggatagtaacagggtctaccttgcagggtcactggaggaagtaaacgggacaatgcatgtgaggtgcatacagtcggtgctcaataaatggtgggcaattttatttaccagacaacaagtggaataaggtctcaggtgcccttcagttttaaatggccatctgttgtcttgataagggctcgttttttttttgtttctggttctgtttgtttgttgttttgttttgtttgagacagggtctcactctgtcacccaggctggagtgcaatggcaggattttggctcactgcaacctctgcctcctgagttcaggcaattctcccaccccaacctcccaagtagctgggagtacaggcatgggctaccacatccggctaatttttgtatttttagtggagacagggtttcaccatgttggccaggctggtttgttgtgttgtgttttgttttgttttgtttttgagagggaatcttgctctgtagcccaggctggagtacagtggtgtgatcttgactcactgcaacctctacctcccagattcacgtgattctcctgcctccgcctcccgactaggtgattacaggcatgtgccaccatgcctggctaatttttgtattcttagtagagacagggtttcaccagtgttggccaggctggtctcaaactcccaacgtcggatgatctgcctgcctcagcctcccaaagtgctgggattagaggtgtgagccactgctcctggcctgagggttcagcttttccttgcaggaggcctccaaccaagctccttgcatccatcttgcagttctgtgtgaatgtctaggaggcctgaatggtacagagcaacaagccccagcaacctcacctctgggctcctgctctagcctgctccccatggcttatcattaaagtaccaagagcagatgatggctccactcctcccactccagagctcccagctgtcaggccatcctgctcccagacagccgtttctgtcctgtccctccccaggcagtggctctgtcctcccatatacttgttctgtttcacgggtggctcctgctgcctgctggcagccatttcagccagcgagtttatccaatataataaaacagctaccaccccaaggatgtgtcagaagagcaaatgcatgtatgtcctttagatttcagagagctccttaattaattggccaaccccaagaggcggctgcccagggcctggggccatgtcagagaatcacagcccaccctgtccacagcacagagactgggctctcctggcaggggcgcttgcttgtcacagtagcattcaatcgatgtgcgtggaatgaatggattaactaacgacaagagcccagctgtcctggattcatgcattcacgcatgtattcattcagtttccactcaacaagcattacggagcactactgttttcaataaatgttgtgaccagaactgaagaattcctttagcaaaacacagaatccctcctgtagttgatagtaggggtcagtggggtgtgaagtggcagtgtttcacctgcccaagggatgcctcttctcctcttctcaacagccccatgaactaacagtccacagccatgatgagaagtttctctgttttctggtccctacacagcctgttctggcttcactgaacacattttctgaatctctactgtggacacctaaaaataacagcctagtgcatccctgagtctgaggctccatccctgttgatggcgcctcctgcttcaggcttgaaagaatggacctgtctctggagcaggtagccttgggaaggaggaaccaagcctccaggcttggcccaggagggaagacgagcaaagctccctgccccagtccctcactgtgcacaaggacccagagacaggctttctgagaagcatttttcccacggctcctgggatctcactcacatgcgctcgcgctcgctctctctctctctctctctctctctctctctctctctctccctctctctctctctctctctctctctctctctctctccccctctccccttctaaccctctggctgcctttcccagcctcagctgaagcagtgactgagtgttagacttggaacaatagcagatgctccccagctggcatgctctgttctcttgggttccatcgtcccctggctggcatttcagaatctcccaatgttagatgaccgaagatgggatatggccagatcctgtcctgggattcaaatggttctgtcagggacaatgctggtgttgaccacctcctggaatactgcaggattctttcagagcaacagccaaatgaagacagccgtgggatcaagccttctgtactaattgtgatgtcactgggaagtgggcttcccctgtggacactggattgctattggacctgagttttcaaggttctggccaacctgggcagctaaggaagctccctgacacagcaaaccatggctgcagtacacaagtgtgctacagcccaatcctggacatatggtcgttaccaaaaccccagtcatcttcttgaaggagccttagtataggaaaccagaggtgacctagaatcttctatttgatcaagggatggctcattatctgacttagcaccagggattcatgctaagatgtattgtctcttgatatcagagtcaagacccaggtaagctggcccgtgaggcgtggttcccatcgccaggagacaacagccgcgctgaccagctgctggcaatttcttcggtcaccctgcctctcaacttccaaagccccatggttttcgggtttacccacatatgacccttatgtaaatttgcttgtcccaagaacccttaactcatatcgtgtctgtttcctgtgtggttggttattgatatagtttggataaaatgccttggtctttagtatagtttggatattgtcctctccaaatctcatgttaaaataaatgtgacctccaatgttggaggtgaggcctggtaggaggcatttggattattggggcagatccctcatgaatggcttggtgccctcctcgtggtcatgagtgacttctcgctctattagttcaggagtttaaaggagactggcacctccttctccctctctcgtcacatgatgtgcctgctccccctccactttccaccaagattagaaacttcctgaggcctctccagaagaagatgctggtgcctgcagaaccatacgccaaataatcctctttttaaaaataaattgcccagcctcagggattcctttatagcaatgccaaatggactaatacagtcactactatgtgcgttcataggcagaaggcattgcagggcaatgaacagagccattggttaaagatttgccaacacttcccagcacatgcttcctttaaacatctcgtgttgccaactaatgagaagaaatggtatccacaaataataccagcagtccgcacacctgaggagtaagtacttattcagaaagctttgctccaatgacagtgggaggaaaattggccaaagcaacagggactcccccaggtacagtgtgaagagcaagtttctccccagatatcctcagcaagaagatggcaggatccacagagagacaatgtccccttttgggcaaacaagagggaaggtgtgatcatcacgctgtgatctgaaaaccccacggtaagcacagtggaagtaatgacaccaaccactggcctttactgtgcactttgtctgtgtcgggcatgagactgagaattttgcctttattattctagttaatccttccatttacactgtgagactgttgctaccacttcctctattttacagtggaggaaattgagtctcagaaaggttaaggaatttgctcaaagttgcagaactagtaagtagcagaaggcagtttacacccaggtctgtctacttttacaatttatttggcccagtgtcctgcctgtgccaccctctgccatgtgcccccttgtccagaggccctggagctcaggtcaggggctcattcaagcctgccgcgtggggctgggccagaacatccctcagcaaagccatctttacacaagctcaaagaggccccgacccagatcttgagcggatctgggatctccgtgtccccatggctttcctgacatcttgaggtttcagtatctggacatgagcaaaagtgtcatctctctacctgcctaaagggaaagtctccattcaactgaagaatcttctcttctctcttcacttgattataaagaacacacttctgttaacttcaatatttgccttagccccacactctatttaaaagccaaacatggtgccgggtgcagtggctcatgcctataatcccagcacttcaggaggccaaggcaggaggatcacttgagaccaggagcccaagaccagcctgagcaacacggcgagaccccatctctacaaaaaattatttaaaattgaccaggctcggtggcacatgcctgtagttccagctactggggaggctgaggtgtgagggctcacttgagcccgggaattggaggctgcattgagctatgattgccccactgcactctagcctgggcaacagagcaagactctatctctaaaaaccaaagacgaaattgtgtttccagttctcctccaaggccatccaggccacacactggaccccaacagccttcctcccaatctctctctcaacacaggactgcaggttttggatttctagttgtggcacaagcattactctggccaaccctaaaataaggcccagcactgccttccctccatgaacacaggctgggtcccccagttgagagtctaccataatcaatctgtctacatgggaccgtcaggagagccgccaagagatcagaggtgtggaggcaaggacttagcctgcagggcccagctctatgactttgaggaaagctcccattactgcagacctgggtttattctgtaaaatgggggtgcttccagcctgccccagcgcccccaggcagtgagtcagggtgcttggcaagtgtttcactttgcagaaaatggtctcctctcctgtgggtgagaagtcccaccactgtgccaggcattccatcagcagcagttccaggaaaaccttcatgagtctcgttggaaaaattatgtatattagttacataggccccccctaattcaggtctgagagcgctctgtgggacttcagtcaatattggctgaaaatcaaatacagaccttgttatgattccatgcaaacactgcactgaattccaccaaagcatgctccaggcttgagagagaacattacattaacttgcacaactgtccatggggcaaaacacatgtcctgacccctctgccaattacaaggatgcgggctccacccaggcattctcataaattcaaggactccactatcgaggcagcaaatcagcaccaacacacttgaaaacaagcgggcatagatagagactgagaactgatgtaactgacttgattgagaatggacgcccaatattcaagtgaatgagtaagtgaatgagtgagtgagtgagtatgtgagtgaatggagagacagctaagtggaataaagaacatcagatatggagtcacaaaatctgaggtctaatcttgctctttcattcactgtaattttctagcttaccttctaagcctctgttttttcatctataaaataaagtgaagattatatatagtaaagattaagtgaaatgatccttgtaaagtgcttagcacagtgactggcatataggctctcaaaaaattataataaacaaccactcaataataatgacaaagccacataccaaaatgcacaattgagatttaggtaccttagaagcattggctacttttaaatgtagatatagaaaaagactgacccactcaggattgggttatatgtttctgtttggaggcatccctgcttcaaactcatgccagtatgaaaagcaaaatgtaattcaagaagttgtaaaatacatagccatcttcaaaaacaaacactgcaagaataagatatgatttgaaaacaaaaagtggcagaactccagtggctgaatccctgaagttcctattgtgaggagtggtgggactacgagtaacctctgggaggcaagggcataactgaaagccactgtgtgagcccaccggctgaagctgtcccctgaacatgggaaaggtagctgggaaaaagtatgacggactgtgagcgggtgaaaggggatgcactagatgattgccacatctaggatctgagcgatatcaaagaagtagaaagtctgatatctgtggaattcgttgggtgctgctaaatgttattgatacattgaagattaaaattacagactcaagtcagtcaattaccaatttaaggcatggatgataggcaaaaggcctccatgacaatgcttaaataaatcatccttcccatggtcagatagcagaccatccagaagatggaacctagaatctgagtgaaagagagcaacgcttcagagagaagtggggtcccatatgccaaaattaaggtcttgacaggacagaattgggaccctgaaatggggtagagacatctgggtggagagttgaaaacactaaacctccagattccctggaactctctctacctgcagaagtggtgggctattcctttgcgggagacagcaaatgcccttgcttgaaatctactcagaggcctcagtggtgacaatctcttgtaagactgtctttcctcctcaagatcttccttcaccatactctaccctcacccccactggccacaagaacaataaccagggtggagtctcagtaaggtctaactaggaaatactggccctcctaaagtaaaagaagggcgattgaacaaaaatgtctggccagtaatcaacacatcaaaaaatagatgttggcatggacgtggtgaacagggaacacttctacactactataaactagtacaaccactatggtgggaatgtaaactagtacaaccactatggaaaacagtatggagattccttaaaggactaaagtagaaccaccattttatccagcaattccactactgggaatatacccagaggaaaagaagtcattatgtgaaaaagataacttgcacatgcatgtttatagcagcacaatttgcaattgcaaaattgtgggaccagcccaaatgcccatcatggataaagaaactgtggtatagctatacaatggaatactactcagccataagaaggaatgaattaatggcattcgcagcaacctgaatgagattggagactattattctaagtgaagtacctcaggaatggaaaaccaaacatcgtatgttctcactcataagtggaagctaaactatgaggatgccaaggcattaagaatgacacaatggactttggggactcaaggggaaagggtgggaagaggtgagagataaaagactacaaattgggtgcagtgtatactgctcgggtgatgagtgcaccaaaatctcacaaatcaccactaaacagcttaactaacgtaatcaaacaccacctgtttcccaataacctatggacattaaaaattttaaaatttaaaaaatttttaaaaatacctggctgatatgaacccataggaatcaagagagcttgcctggaagtgggtcttaaggccactgaaccaagagtgggtatgaaaaagggcacagaatttgaggctggatgagaaattcaacacttggtcaaggtcctgggagtcagtcctagcaatttctgaatggttcttagtctcttgaagaaaaataccttaccataaataaaatgtggaggggatgtgaagaaagccttgctggagtgtcaggtaaggggttcagttcttgtgatcccagagaagtggccatgttaccatggatctgttacataagatctgagttctcatcatatgtttcctgagagaattcagaggaaacttccctcactgaggaggtgggaaggaactggggaaggaagaaagatggaaagaggggagactgaggaggcatcttaagctcagtagtatctatctgctctaagctatgctgataataggaagtcttgtcatggagtggagctttctagaatcaccaaggacaaaagggttctggaactgtggaggccatatagcagcacttaatcattagaggcaaggtagacactgaggtcaggatggcaaccaggggaatgttacctacagggatgtgtgatgaccatggtgtacttagtgactccatgtggctgacaaaggtattgatcaagaatggataaaaatgagcaaagaaaggagattaaacgtaccagtgggcagtaagttacatgtcagtcagttctcagacacaggacccatcaattgaaggagaggctctcttgagaaaagacactgcgatgccacaggaggtataaacaacagcagttacccctgttacaagtaattgtgccttggaaaagggaagaagtttatatcttcagtgtgctgttggatacagcatcagagctaacattcatacctgaaggctcaaaacacaaatgccctccaccccgcattaaggtgaaggtatgtgagtgcaagcagtgaatgcagtccagtctttctctcagtgggtcccgcaggtccacagacccaccaagtgggcatttcctccattccggaacacatcaccaggatggacatacctagcagctaacatagtaggaaaggccgaacgccagctcctgaaattgccccctgacccaagcaatcaaaactaataccacgggccaggcgcgggggctcacgcctgtaatcccaacactttgggaggccgaggcgggcgaatgacctgaggtcaggagttcgagaccagcatggccaacatggcgaaaccccgtctctactaaaagtaccaaaattagcagggtgtggtggcaggagcctataatcccagctactcaggaggctgaggcaggagaatcgcttgaacttgggaggcggaagttgcagtgagctgagatcataccattgcactccagcctgggtgacaagagcaagacttcatccaaaaaaacaaaaaaaactaataccacatctgggagtagaggtagaaatgagtgttattctcaaagacttaaaggacagattggcatggaattcccttatgtcctcccacttaattcataagtctggaacttgcaaaatccacatgaatcatggtggatgaggatggaccactcagacttaaccaagtgtaaccccagtcacagctactttgccagatatggtgtgtttacctagaacagatcaacacagcttctgctatgtagtaatgcagctattgatctactggacttgtttgaatcttcatcaaggagcataagaggcagtttcactcacacaggatgggtgagaatatacatccatagtcttctcctgtggctatgccagctctccttctatctgtcacagtacagcctaaggtgaccttgaacatctggacatttcacagaaaatcacatttctccacaatagtcttgcagaggttggaagacaaactctgcagggtccagattaagagaaggctctgcagcaggtccagaatatagtgcaagcagagctgacacttgggtcatacgattcagcagatcctatggtactagaaatatctgtggtagataaaggtgcagggtcaggtctctggaaagccccaacaggagagttatagtacagattcctgtggctttggagaaagccatgttgtctgctgcagtcaaatataccttatgcaaaaatctgctcccaaaatataaaagccacataaaacctgagcccctgaccatggaacatcaagtgactgcaaccagagctcttgtaccaagctgggtgctctttgaaccaacaagtcatgtattgggtggattaagcagtaattcatgtgtgggagttatacatccaggagcaagcacaagcaggttcaaaaacacaagcaagcaatacaaactgctggcccagaccctcatgtcacccacctatgtcatgccaatgcatctccctcagctcaccgtatggcctctttggggtgggagggggtgatctctacaaccagctgacaacggaggcaaaaaccaggatgagtctgccctgcatggcaatgcaagatgaaagtgaacttctactgcactgcagctgcactcaggggtggccctgagagtccaggcagtcatccactctccatctctcaattgcatggagagagaaatggcccgaaatacatatattcccaagcagtgtgaattatctgttttctgactgactagacagactctcaaaagagcaagattgaaagattgagaacaggctgggcacggtggctcacgcctgtaatcccagcactttgggagaccaaagcaggtggatcatgaggtcaagagatcgagaccatcctggccaacatggtgaaaccccatctctactaaaaatacaaaaaattagccaggcgtggtagcaggtgcctatagtcccagctactcgggaggctgaggcaggagaatggcgtgaacccgggaggtggagcttgcagtgagccaaggtcgcgccactgcactccagcctgggcaacagagcgagactccatctcaaaaaaaaaaaaagaaagaaagaaaagaaaagaaagaaagattgagaacaaggagattttggcaagcgtcatgtggctagaactatgcaagtcaagtgtgtggattttgggatcacacatcaatgcccaccacaagcagccacttcaagggaggcattagacaaccaggtacatgggagctcttactcagaggtgtccagcagcaccatcagccaccccgaatctgcccagtaaataaatgctcagccagtcagcagaaaccttcgatacagtgtcaccctccaggaaactaccaagacaagttaatgttgtgtcaagttaattatatacaacttcttctaccctggaaaaagtgattcatcctgaaaggaactaaaacatagttccagaatcgctttgccttttttgctcataatgtctcagccaggaccactatccaaggggcaagtacatgattggtcattggattgcacatggtatcaacttgcaccaaaagacccactttatgacaaaggaaaacacatcctatcacctagaagctgccagcctgaggtgttcacttggagataaccccaaaaaatctaggatacagtccctgagatgcagaatatatcttgactcaaaggccatcatgtgtcttcaatagagaagaggtgtggattcaggaaccaaggggtgacagtgggcataccctgctgtacctcactcccagtgaccttccatttaccccctcccaactttagaggtcttgtttccctgaagatgaagtttccacccggagacattgtaaaagtcccactaaatgtgaaagtacagctgtcacccggtcatttggggctcccataccagtaggtcagcaggaaaagaaaggatttcccatactggcaggattgtcaggaggagatagggttcatgatacagagtgggaacaggaaaaagtaaatttgggacataggaatccactgagacatctgttggtgcccacatacagtgattatggatggcaattataccaatatagcctgaaagaatacgttcagacaccacaggagataaaggtcaagtctaggcaagccactgagaccaggagaagagaatctacagtgggtggctgaggagggagctgctgagtatccagtacagcctcaaaaccaactgttgtagtgaagatcatagtttgtctgacttgtcctcttcttttaagtatttttttcccagaaatttgaagccatcactcccttaccaaattcataacagaatggagtgatgtagaaggatttgaaaggttggatcatgcagtcctttacccaaactcctttttaccatgtttgggcacccatcctctatctcctagacctgaatctgcacaatgctgaagcatacttccactgcagaactccctgtggaatcaggctgaggccaccctctgtgggactctgcctgagatcacatcttgctggcttcctcccttccctgccccacctccctagcacgctccctaggagcattaccataataaactacttgcacattatcttaatccatttcatgctgctataacagaataccataaactgggtagcttataaacaactgaaacttatttctcatgattttagtgactgtgaagtccaatggcacagcactgacatctggtgagggcctttgtgttgggccataacatggtacagggcatcatattggtgagagagagtgcaagaaggagctgaatttgtttttataaaaattctttctcagtaaggtactcactcctctgataacaacgttagtctattcatgaaggcagagccctcatgacctaatcatttcataccatcccacctctccatactgttacactggggattaagtttttaacatatgaactctaggagacacattcaaaccgtaacacacaaacctcatttcagatgctttttctgtagacctgagctaagaaggcattttatatgctttggctctgtgtccccactcaaatctcatgtcaaattgtaatccccagtgttggaggagggacctggagggaggtgactggatcatggaagcagatttcccccttgcttttctcatgatagtgagtgagttctcagaagagctggttgtttgaaactgtgtagcacttccccctttattttctctctgtctcctgccagccatgtgaataagtgcctgcttcccctttgcctttctccatgattggaagtttcctgaggcctcctcagaagcagaagcctgtacagcctgcagaactttgtgccaattaaaccttttttctttataaattacccagtctcgcatatgtctttataacagcatgagaacaaactaatactacatcattactttttgtttgtttgttttctcaccctaacggagtggaaaatgttttcgaggagatgtaggggactgggagagtgaacaacagggctgagcctcccatgtatcagaatgaaggcccaaggacacctactgaatggggaaatgttccaaagcctagggcatcctccacataaatggtatcgtctgacaaagcctgcataccacccagaggcactcttactctgccttttccaccatctcaaacagtgaatagaaagaaactatgcagccattacactgtagctaagagggaggaccaggaggtctcaggtacaatattcgaagcaaagaggatgcctagacagagttggcactcatgaactagatgaaatgtctcagcgtggaagccatgtgagcacaaaagacaaagaagagagataggaacgcagcagtcaaggagtccaacctatacaaaaacattactcagggaacagaagaaaattacccacaactgattaaaattagggaaaaatttaatagaaacatgaattcaacaaaattaaaattcaaagatgagatgataaagctacagaacaatatggaaaaagagattagaaacttgggaaacaaaattaaatcccaaatagcattactacagagaaacagaataggcatgactgataatctaattactgacatagagaaaatgatataatatgtaactgacataataaaaatgagtgcatataaaaaagaaattaggggaggagccaagatggccgaataggaacagctccggtctacagctcccagcgtgagcgacgcagaagacgggtgatttctgcatttccatctgaggtacctggttcatctcactagggagtgccagacagtgggcgcaggccagtgtgtgcgcgcaccgtgcgcgagccgaagcagggcgaggcattgcctcacctgggaagcgcaaggggtcagggagttccctttccgagtcaaagaaaggggtgatggacgcacctggaaaatcgggtcactcccacccgaatattgcgcttttcagaccggcttaaaaaatggcgcaccacgagactatatcccacacctggctcagagggtcctacacccacggaatctcgctgattgctagcacagcagtctgagatcaaactgcaaggcggcaacgaggctgggggaggggcgcccgccattgcccaggcttgcttaggtaaacaaagcagccaggaagctccaactgggtggagcccaccacagctcaaggaggcctgcctgcctctgtaggctccacctctgggggcagggcacagtcaaacaaaaagacagcagtaacctctgcagacttaagtgtccctgtctgacagctttgaagagagcagtggttctcccagcacgcagctggagatctgagaacgggcagactgcctcctcaagtgggtccctgacccctgacccccgagcagcctaactgggaggcaccccccagcaggggcacactgacacctcacacggcagggtattccaacagacctgcagctgagggtcctgtctgttagaaggaaaactaacaaccagaaaggacatctacaccgaaaacctatctgtacatcaccatcatcaaagaccaaaagtagataaaaccacaaagatggggaaaaaacagaacagaaaaactggaaactctaaaacgcagagcgcctctcctcctccaaaggaacgcagttcctcaccagcaatggaacaaagctggatggagaatgattttgacgagctgagagaagaaggcttcagatgatcaaattactctgagctacgggaggacattcaaaccaaaggcaaagaagttgaaaactttgaaaaaaatttagaagaatgtataactagaataaccaatacagagaagtgcttaaaggagctgatggagctgaaaaccaaggctcgagaactacgtgaagaatgcagaagccttaggagccgatgcgatcaactggaagaaagggtatcagcaatggaagatgaaatgaatgaaatgaagcgagaagggaagtttagagaaaaaagaataaaaagaaatgagcaaagcctccaagaaatatgggactatgtgaaaagaccaaatctacgtctgattggtgtacctgaaagtgatgtggagaatggaaccaagttggaaaacactctgcaggatattatccaggagaacttccccaatctagcaaggcaggccaacattcagattcaggaaatacagagaacgccacaaagatactccttgagaagagcaactccaagacacataattgtcagattcaccaaagttgaaatgaaggaaaaaatgttaagggcagccagagagaaaggtcgggttaccctcaaaggaaagcccatcagactaacagcggatctctcagcagaaaccctacaagccagaagagagtgggggccaatattcaacattcttaaagaaaagaattttcaacccagaatttcatatccagccaaactaagcttcataagtgaaggagaaataaaatactttatagacaagcaaatgctgagagattttgtcaccaccaggcctgccctaaaagagctcctgaaggaagcgctaaacatggaaaggaacaaccagtaccagccactgcaaaatcatgccaaaatgtaaagaccatcgagactaggaagaaactgcatcaactaatgagcaaaatcaccagctaacatcataatgacaggatcaaattcacacataacaatattaactttaaatataaatggactaaattctgcaattaaaagacacagactggcaagttggataaagagtcaagacccatcagtgtgctgtattcaggaaacccatctcacgtgcagagacacacataggctcaaaataaaaggatggaggaagatctaccaagccaatggaaaacaaaaaaaggcaggggttgcaatcctagtctctgataaaacagactttaaaccaacaaagatcaaaagagacaaagaaggccattacataatggtaaagggatcaattcaacaagaggagctaactatcctaaatatttatgcacccaatacaggagcacccagattcataaagcaagtcctgagtgacctacaaagagacttagactcccacacattaataatgggagactttaacaccccactgtcaacattagacagatcaacgagacagaaagtcaacaaggatacccaggaattgaactcagctctgcaccaagcggacctaatagacatctacagaactctccaccccaaatcaacagaatatacatttttttcagcaccacaccacacctattccaaaactgaccacatagttggaagtaaagctctcctcagcaaatgtaaaagaacagaaattataacaaactatctctcagaccacagtgcaatcaaactagaactcaggattaagaatctcactaaaagccgctcaactacatggaaactgaacaacctgctcctgaatgactactgggtacataacgaaatgaaggcagaaataaagatgttctttgaaaccaacgagaacaaagacaccacataccagaatctctgggacgcattcaaagcagtgtgtagagggaaatttatagcactaaatgcctacaagagaaagcaggaaagatccaaaattgacaccctaacatcacaattaaaagaactagaaaagcaagagcaaacacattcaaaagctagcagaaggcaagaaataactaaaatcagagcagaactgaaggaaatagagacacaaaaaacccttcaaaaaatcaatgaatccaggagctggttttttgaaaggatcaacaaaattgatagaccgctagcaagactaatgaagaaaaaaagagagaagaatcaaatagacacaataaaaaatgataaaggggatatcaccaccaatcccacagaaatacaaactaccatcagagaatactacaaacacctctatgcaaataaactagcaaatctagaagaaatggatacattcctcgacacatacactctcccaagactaaaccaggaagaagttgaatctctgaatagaccaataacaggatctgaaattgtggcaataatcaatagtttaccaaccaaaaagagtccaggaccagatggattcacagccgaattctaccagaggtacaaggaggaactggtaccattccttctgaaattctattggaaaatcaatagaaaaagagggaatcctccctaactcattttatgaggccagcatcattctgataccaaagccgggcagagacacaaccaaaaaagagaattttagaccaatatccttgatgaacattgatgcaaaaatcctcaataaaatactggcaaaccgaatccagcagcacatcaaaaagcttatccgccatgatcaagtgggcttcatccctgggatgcaaggctggttcaatatacgcaaatcaataaatgtaatccagcatataaacagagccaaagacaaaaaccacatgattatctcaatagatgcagaaaaagcctttgacaaaattcaacaacccttcatgctaaaaactctcaataaattaggtattgatgggacgtatttcaaaataataagagctatctatgacaaacccacagccaatatcatactgaatgggcaaaaactggaagcattccctttgaaaactggcacaagacagggatgtcctctctcaccgctcctattcaacatagtgttggaagttctggccagggcaatcaggcaggagaaggaaataaagggtattcaattaggaaaagaggaagtcaaattgtccctgtttgcagacgacatgattgtttatctagaaaaccccattgtctcagcccaaaatctccttaagctgataagcaacttcagcaaagtctcaggatacaaaatcaatgtacaaaaatcacaagcattcttatacaccaacaacagacaaacagagagccaaatcataagtgaactcccattcacaattgcttcaaagagaataaaatacctaggaatccaacttacaagggatgtgaaggacctcttcaaggagaactacaaaccactgctcaaggaaataaaagaggacacaaacaaatggaagaacattccatgctcatgggtaggaagaatcaatatcgtgaaaatggccatactgcccaaggtaatttacagattcaatgccatccccatcaagctaccaatgactttcttcacagaattggaaaaaactactttaaagttcatatggaaccaaaaaagagcccgcatcgccaagtcaatcctaagccaaaagaacaaagctggaggcatcacactacctgacttcaaactatactacaaggctacagtaaccaaaacagcatggtactggtaccaaaacagagatatagatcaatggaacagaacagagccctcagaaataatgccgcatatctacaactatctgatctttgacaaacctgagaaaaacaagcaatggggaaaggattccctatttaataaatggtgctgggaaaactggctagccatatgtagaaagctgaaactggatcccttccttacaccttatacaaaaatcaattcaagatggattaaagatttaaacgttagacctaaaaccataaaaaccctagaagaaaacctaggcattaccattcaggacataggcgtgggcaaggacttcatgtccaaaacaccaaaagcaatggcaacaaaagccaaaattgacaaatgggatctaattaaactaaagagcttctgcacagcaaaagaaactaccatcagagtgaacaggcaacctacaacatgggagaaaattttcgcaacctactcatctgacaaagggctaatatccagaatctacaatgaactcaaacaaatttacaagaaaaaaacaaacaaccccatcaaaaagtgggtgaaggacatgaacagacacttctcaaaagaagacatttatgcagccaaaaaacacatgaaaaaatgctcatcatcactggccatcagagaaatgcaaatcaaaaccactatgagatatcatctcacaccagttagaatggcaatcattaaaaagtcaggaaacaacaggtgctggagaggatgtggagaaataggaacacttttacactgttggtgggactgtaaactagttcaaccattgtggaagtcagtgtggcgattcctcagggatctagaactagaaataccatttgacccagccattccattactgggtatatacccaaatgactataaatcatgctgctataaagacacatgcacacgtatgtttattgcggcattattcacaatagcagacttggaaccaacccaaatgtccaacaatgatagactggattaagaaaatgtggcacatatacaccatggaatactatgcagccataaaaaatgatgagttcatgtcctttgtagggacatggatgaaattggaaaccatcattctcagtaaactatcgcaagaacaaaaaaccaaacaccgcatattctcactcataggtgggaattgaacaatgagatcacatggacacaggaaggggaatatcacactctggggactgtggtggggtcgggggaggggggagggatagcaaaaaaaaaaaaaagtgtatttttatggaatacataaaaggtaactcttgtgagttatgactttgaaaaaaaaaaaaaagaaattaaaatcatttgagaaccactgactgtaaaaaaaaaagacagacagtttatcttaagaataactggtgttcctaaagaaaaaaatccaacaagtagaacaaaatatgtattcaaagatataatacaagaaattttccctgtattgaaaaaaataaatgaacatgctaaaaacaaaacaaaataaacaaaatagcacaatgtgttttagcaacatttgatacagaaattccaacacaaagacacagcccatccaattaagttattaaacttcaaagttaagagagaaatttttacatatctaagcagaaagagaaaaatcacacacaatgggaaaatcaggcaagacactgacttctctacagcaacactcagagcccgacaaaaaggtattaatgtctgtgtttggagggaaagaaaaggcagcaaagaatattacacccagccaaagttattcatgtataaaggcaagaagcatccattctgaaatgttaaatacttcaggaaatgtagaacacagaagcctttttcaagaaaataaaatgaactattcacaattaaatccaagcaattaacagattagaaatacgtaaaaataaacataggaattgagacattggggtagaagaaggaggaatgagcagagagttcacttaaatatagataaacattaagtaactcagggaattatgatgacagaacaaagtgtgaaattaattaagctggacaaggtaaaagtaaaaaagctaacaactcttgggagataggatggtaaaatgacggggaggtgagtaaatcaacatctcatctttcaaagaaaggagccaatagactaaatttgaaacttttgagaaaactcgaaacttgaaatgaatttttttttaaaaaaatgactataaactcctgatgtgtttcacaatctctcttttttgtttttaagggattttctgggaaataaattttacataaaaaaatatgtatttgaagttcacagttccctcagtttcacttcacttacattttcttctattaagtaaaattaaatactttatattttgaaataacatctagagatggtcattttttataaagataagtatttgtccaggtatccatgttactttctatcagcatacataggtgtctggaattatgtttgcctaagttagtgagatttagggttttttaaaagattttcttcactgtacatttttgcctcatttaacgtctttatgatatgcatgattcatttttataaaagcaatagaatgatttccttaaggcaattatgccaagatattaattatagtgattaatttctggtagtaagaatactgatgggttttttttgtttggtttggtttttcataatgcaacttaaacttcaaaaaatatagttaggaaaaataaggatggataatcatgaaaaaatagaagtaaaatctgtaatttctaaatcaggagaggaaagtgatgaaagctttagtaattaaatgtaaatgaggaaaagagttgaagagaagaaaataaaatggtaaagaaaacatatatcagaccctgttgaaaacaaacaaaaaaagaaaacataaaataagcagtaaaaataagttcaaatagatcatgtcagcacttgtaataaatataaacaggtttaagttataaattaaaggacagagtctaacaaattggatttttcttaatctagtgatattttgcttataagagacacacgaaaataaatgacccaggaaggtcaaaaatagaggaatggaaagaatatcgctggcacaacaacaacaaagcagaatagcaatattagtagcagataaaatctaacttaaggcaaaaagcatttatggagataaagaactccatgtaattataaaaggaaaggactcaccaaggagatataacagtcatgaattttatgtacctcacagcaacatagcctcaaaaatgtgtaaagcaaaactgacagaattttaagaagaaactgataaatctataatcagagtgggagattctggctcactgtattggaaattgctccagcagacaaaaattacttataacatagaaaacttgtacaacatcgtagcaagcttggtctaatagatatacaaagaatccgtcaacaaatacaaagtgtgcattattttcaagaagataaggaatacttacaaataacaaatcttgcaacaaaagtctcaacaaatttcagaaaatcaaatatcaacaaatattattctcagaccccaatgcaattaactcagaaattgacaattaaaagacaaaaatatagaatattttaaaattacactcctaaattacttgtgtgttaaaagtgcaaattaccgaaacattaaaatatcaggggctaaaggaaaacagggttctacaaaacataagttgtggaataaattcaatactgttcttgataaattcatttacataaaaagagtgaaaataaatgttatacaactcaagaagaagattaaactcaaaaaaggaaaaggaagaaaatgatcgtagttaaggactagaatgtaagtagtttattaaggaagtactcccagaagaaacaagtaaggaagtgggaaaacacagtaaatacagagaagatttgttctgtcttacggcaaaagagttgagatatactgtatctagccagttactggctacaggatgtctgaggtgggaagcatgtaagcctcaggcacctttagctctccataccagcaggtggctccagtgcccaacagcagtcctttgaagattgcaagtgcaaatttttaagagcaaaatacacggaagctttgggagatgagcttactgagctggtaaatagaatgcacaggcatttagtaagggcatccagggaggctactacagaattttacagaggaggaaaacaagtaccaccaccaaaggaaatgttcaatacaaccagaaatcactcattttaaaagaacgaagtagatagatctctagaaaaacagatgaagaacagcaaaactgcatttttcaaaaggcaatatgtaagcagccaacattgactacgcctagtacgacatatctctcccacccattacaactaaaaattctagacaaaatacaaaaagcaactacctgggggttttgaaaagttaacaattccagagcaaccactaagaaaagtgccagtagattaatttaaaagaaatttaagaaaaaaaaagaaggcagaaaagaaaagaaaaacaaaagtagagaggacaacaaacaacaataaaacgtagacctaaatccaaacatatcaattattgtgttaaacgtaaatgacttaaacatcaagtaaaagacagagattatctatttggattttctaaagacccacatatctgctatacaaatacttaaggaagaaacagtaacaactctattcaatttatttcagaatatagaaaaggaatgaatacttcccaactcattttgtaagagatgtattaccttgatttcaaaatccaacgaagacattacaaggatttttagaagttaaaaactacagatcaatatttctcatgagtgtagatgcaaaattatcaccaaaatattaacaaattctaataatattataaagataatacaccacgatcacatgaggtttactctgaggatgcaaggttagtttaaccttgcaatcaatgtatcgtattagcagactaaagaagaaaaaccatgtgattatcttaatagatgcagaaaaagcacttaacaaaagtttaccaccatgactttttttaatactcagcaacctaggaatttaagagaactttctaaacctgattagggccatccacaaaagaaacctacagctaacatcaaatttaatagtgaaagatggaatgcttctcccctaaaatgagaaacaaggcaaagatatctaccttcatctctcttatgcagcatcatactggaagtcccagctagtttgacaaggcaagaaagggaaataaaaagcatacagattgcaaaagaagaaataaatatccctttattttcagataacatgatgttaaattaaatacattaaatacaagatcaataaacaacaaatcaattgtatttctatatactagcaatgaaaaacatttaaaatatgttttaccatttactgaaacaggaaacacatagatataaatctaacaaaatatatgcaagacctgtaggctgaaaactatgaaacactcataaaagaaaacattcttttcttttctaaataaatggagtgacaaatgtatgtccagaggttggaaattcagtattgctctcaattctccctaaaatggtctacaaattcaatgcaatctcaatcaaaatcttagcagaaattgttgcagatactgacagggtgtgtctaaaatttattgggaaaggcaaaggaaatagagtaaccaaaaaaattttgaaaaataaaagtaaagttggaggactcccactacctgattttaatgcttatcataaagctacagtaaccaagagagtgtgatactcgtggcaagatagacatatagatctatggaaaataaagaaactccagaaatagacacagacaaaggtggccaactgatttttgacaaaagtgcaaaggcaagtcaactgagaaaaacataatgccttcaacaaatggtgattaaacaattaggcagacaaaaacaaactctactgacccatccacacctcacaccttatgaaaatattaaaacgtagtataggaataaatgttaaattacaacacttctagaaaaaaaggaaatctttatgactttgggttagaaaaaaattcttagatacatcgcaaaaatatgatcaacaatagaaaaaaaatgaatttgatccaaatcaaaaactgctctgtgaaagacactactaataaaatgaaatgagaagccacagactgggagaaaatatttgcaaatcatttatctgacaagaaaaacttctattcagactatatcttaaaatctaaaaactcaacaacaggaaaacaaacaacccaatacaaagtgggcaaaatatttcaaaaggcactttgacaaagatgatacacacagagcaaataaacacttaaaggttttctacaccattaatcattagaggaaacacaaattaaaaaccacagtgacctgctaaaaagactaacctgtgcctattaaaacaactgaaaaaaataagtaaaacctgatcattttaactgctgcctaggatgcagagccacaaaaactttccaacaatcgctgatgggactgcaaaaggtagagacactatggaaaacagggtagcagtttctcataaaggtaaacatgcatttaccatataatccagcaatcctaagcttaggtatttaactaatacaaatgaaaacttatgttcacgtcaaatcctgtacataaatgtttatatagcaactctattcgtaataatcaaaaaactacaaacaaggtgaatatcttcaactggtgaatggataaacaaattgtggtctacacatacagtggatactatccaacaatagaaaaagaacaaaatattaaaaatacaacatggatgaatgtcaaatgcgttacactggtatagcagtaggtagtatggtatgtagcttttgagtctagctatataatcctatttgtatgtcattttggaaaaggcaaaattataaagatgcttgccagaggttgggggtagtaaaggtagttgacaacgataaggcaatatgagggaacttgggggaaaacactgaaacagacttggtgtgctggtggttacatttgtcagaactagtagaactatagaccaaaaaggataaattcaactgtatataaattaaaaataaataaaaacgatttgaaaaaaatactgagaatgaaagagagacagcatgacagattcagaagagatattttttaaccataagaaaaaacatgaatcactttatgccagaaagttagaaaatataattgatgtagacaatttttggtaaaaaatataaattatctaatattgtgactcaaaaaaaatgagaaatttgaatgaacaaagaacgattaaataaattatatatgttgccagccgaaaatctatttcttagatagacagcaagcccaataactttataggcaaatatttcctagattctaaacatactaccacatcatactaaaaatattttttaaaacacaatttcagaggacagaaaaaggaaaactatccaaatcatgttatggggctactataacctcattaccaaaaccagataaagactactagaaaacaaatacagacttgtttgcacacatgtatatgtgtgtatatatatatatgtgtatgcgtgtgtgtattttatatatacatatatattataaatacatagaaaaataaagttcatcaagaatcctaaaatcaagatcagcacataaaatcagtaactcttctagaatccaacaatgaaccattaaaaatgttattttttaaagagtcattcatagcagctgtaaaagctagcaagaaatataatgaagctatttaatgtacttatgaaaatattacatactataaaaacaccaacatgaataccaatatgtactatgttcatggatgagaagacattatcataagcacatctaattttcttatattgaactataaaataagaacaatctcccttagaatgttaacacttttttgtaatgaagcttagcaatctgatcctaaattcgtgctgagtgacaggaaggacagacaagacaatttttaaaagaaagtgtaaacaatgtaaagaggatgtaaccagtaataagatttgctatagagttggcatcactgaaacaatgtggcattatacaggaacagacaaatagattagcggaacaaggagaaagcgctgaaacagactcaagtaaatataaaaacttgatagataacagaaaagaaattaaaaattagtaaagaaaagtgaactcaatacatggtgctgggacaatgatacatctatctatacatacatagatgtacatgtatatgtatatccatgttaaatatatatatatccttgtgtatagatataaaaatatttaatgtttatatagaatatattgataaatatacagtatatatagtcctacatttcactatttacaaaaaagcattctaggaattttaacattttgaatgtaaaaatgtaatctagagaatttctgttttccctctgtatttagtaacacgtaactgacaaataaaattgtatatatttaaggtgtacaatgtgataccttgattatatataatatataaaatatatataatatatataataaaatatatattatatataataaaatatatatattatatatatattttatatataatatatattatatataatatatataaaatatatatttaatatatattttatatataatatatttaaaatatatattatatataatatattatatataatatatttaaaatatatattatatataatatattatatataatatatttaaaatatatattatatataatatattatatatatatatatcttgtgaaatgattaccacaatcaatttagtaacacatccatcacctcacatagttacctttgctgtggtgagaatattcaagatctattctctgagtaaatttcaagtatacgatacagtattactaaatatattcaccacactgttcacctagaacttattcctcttgtaactgaaagtttgtaccctttaaccaacatctctccttctttccctcccccggcccctgcaaccccactccacctttatttccatgaacttgtctttttgagattccatatataagtgagatgagatagtatttgtctttttctgtcagacttattttgcttagcaagatttcatcaagtttcatccatgttgtcacaagtgacgggatttccttctttttatggctgaataatattcctttgtgtatatacaccatatctttcaacatatgattcatctattcatccttcaacacttatgttgtgacaaaagccatagcttgactattgtgtataatgctgcagtgaacacgggagtacaggtgtctcatcaacatactgatgtcatttcctttgaatatatacccagaggtggggtcactggatcatacaccagttctatttttaatgttttgaggaaactccctactgttttccataatagctgtgccatttatgttcacaccagcagtgcacaagggttctcttttctccacatctcaccaacatttgtcatcgcttgtctttttgataatagacaaggtgtgaggtgatatctcaatgtggttttaatttgcctttcttccgtgattagtgatggtgagccccttttcatatacctgttgaccatttgtatgtcttctttgagaaaatctacttgcccatttttaaaatcaggttctttgtatttttggtattgagttgtatgagttcattatatattttggatattggcctcttatcaaatatatggttgacaaatatttttttccgttccataggttgccttttcatttcactgattgcttcctttgttgtgcagaagtttttagtttggtgtattctcacttgtttatttttggttctgttgactgtggttttgatgtcatatcatagtttcttaaacacaatatcaggaacacacaccatcagaaataataaaatgctatgtgtaattatattaagattttaaaacttctgtgtgctaaagatacaaagttaaaagataggttataacataggactatattccaacacatataaccattaaaggattagtatcaagactatctaaagaactcctacaaagcaattacaaatagtttaatggtcaaatttataaaagataaagcccttatggactgaatgtgtataaaatgctacttcatttcactaatactcagaaaatatgcaaatcaaaacaatgagatgaaataccacatcagaacacatcaccagattagctaaaatttttaaatctggcaatatcaagggtagttatagttgaagggaaataaaaacattcacaagttgttggtgggaattaaaatttatataaacactttcaaaaacaatttggcaagctgatattaaggtgaaaatccatacatctgatggcttggcacttccacttccaggtgtacatggaagaggaacatggcatacaagtcaagaggacctgctcaaagatgttggctgcttcaaggtaaagttcagcaatggaagaataggtaaatgatcgtggcatattcacataataaaatataactgcaccactaaaataactgaaggtgtacatctcaacagggataaatatctcagaaatacaatgttgcataaaaatatattaaaggccagttgtagtggctcacgcttgtaatcccaacactttggaaggtccaggaaggtggctcacttcaggccaggagttcaagatcaacctgggcaacatagtgagaccccatgtctacaaaaaataagaacattagccaggcatggtggcatgtgcctgtggtcccagctactccagaggctgagctgagaggatcgctggagcccaggagttggaggctgcagtgagctatgattgtgacactgcagtccagcctgggcaacacaatgacaccctgtctcaataaaagtggcagatatgcatgtattgtgtgaccccatgtacttaaaatgtggatgacacataacaattatgtatactgttcatggatacatatacatgaggcaaaagtatccaaagcctgataaggaaggatacatcctatttcaaggagtggtcctgcaggggggtgaggggtgtataaaaaaaagactctagctctatctgtaatcatttgccttaagaaagaagaagcacaagagaaaaggtgagagaagagaggggaggaaggaggttaaaagatagatggataatggaaacatggattattgctacattttccccgtttttttttttttgcttgaattgtttttataacagaaagaaggaaaagataggggagggaggaaaagattaaatagaaattcaccaaaatgtttaaagcaactatctcagggtagggcatagtggagaattttattcttttatttacatttttttcatattttccgaattatccccagcaaacatgtatcgcttttatgagctgacaaaaacaataaatgctctttgtaaaagcaccttgctaagctgttgtgatttaaacgcctggattgtgggagagacgctgatattctggacatccgggccagctcccggagcgactgtccaagacaggtttctgggggaactgataagcgaacaaccgaatttaaattccagtatcagtagcagcaacccaggcctcaggaggtgagggctccaggagtctccatactctgccggcctcccaggggacagggctgccacaagagataaaagccagctctctggttctctccaaaaatctttgaaaatcgttttttgaagatcgaggtgactgaacctcataaccatgttatcacaggccccatctatgccattgaagacaagacgggcatccctaaaagacctagcccgtgggcatgatcctatgtgcttcctgtggacacccggctcaatgactggccaagcccatccccagtggctttttcatattgcttaaaacacctctgggaagtcttattaatcttgtctctattttacagagataaaaatgggactcagagaagttaattgacttgggacagggccacccagctaataagcagtatggagtcaacacccaagaaagccactctgtgccccaggggagtcccaggaggccaccctttgccccagtagtagaatattgggcaccaataacaggctaaggggagaaatcatattggatacgtatgcaacattccccaaagtcccaaacccaccatgacagcagccccaaatgcaggggcagaacagggcctattctgaggtcaaactgtacattcctgtcccctgactccagtcctccaatccccctcagcccacaggggtccttgtaagctagagaagctgccacattcacggtgcccaccctgtcctcccatctcccacttcccgtgctcaactctcagacagttaatgtgaatagatgagaagtttaagtaccttggaaagggctaaatgaataggaatgggaaaatcccagtgtttttctcccatcagtctttctgattgctcttaactctatttcctggacagggtctgtggcagtcaagctcctggctagtcattttttatcaccatcgggaaaaacacacagtacttagagcagcaggggccctcttaatatctaggcaggaggtaacccacagggcagctattccccaaaactggaaatggctcttggaggcccggcaggtttctgcacaccaaccaaacgcctgagctcccaggagggagaagaggaagactggagccttctgcccagcctcctgattttcttcccagggctcccggaccccctaccccaagccttagcccagctcccatgctagatgacttcatatcctatcccatggggcaagttacagaaaaactggaactccccatttttatatgaaagtgcctcaatttgttattagtggcaactaattttaaaaagctctaaatgctctctggactgaatgaaacaagtctgcaggatgaatctggcctctgggctactgtttggtccacgggctggctaagagcaggtctaagacagacagcaaaacaaccacaacatataaatgatagaagatgcctcatgcctatcctgccctgactgtgcgccagacagcccatgctacagccattgtgtggcagtgaaagaaggcctcgcatgaccagctccgttttgctcctaacctacccccacatgatatcttctaggttaactgctattgctgatctctgcatgtaggccaagctcactatgggaggaatttcatttatagtttaaagcaaagacgatcatggtctcttcccaacactcacccccaaggagataaggagggcatcccacgagcaacaccacgtgttcaagatgcatccctggaacctgaacacgggcagaagattgcacaacctccctggacccttactggagcaggctgtccgcggtcctcagtcactttttttttttttttttgagatggagtctcgctctgtcacccaggctggagtgcagtggcttgatctcagcttattgcagcctctgcctcccgggttcaagcaattctcccacctcagcctctcaagtagctgggattacaggggtgagccaccatgcccggctaatcggctaatttttgcatttttagtagagacagagtttcaccatgttggccaggctggtctcaaactcctgacctcaggtgatccatccgccttggcctcccaaagtactgggattacaggcgtgagccaccgcacctggcccttggtcactttttcatcccaacctcccccgcttcccctttcccttaacatcaaaacagcctgagatttgtactgacttaggatggttctgtagggcattcatctaccctcctcttggctgctggctctccaaaataaagtcgtcttccttgtcccgactacttgtctctcgatgtccatgggtttgggcttatgctaaaccaacaccatgaggtagcggcgcaggtgttttcggtgcccttggtctatcccagatgtcagcagctactatggtgggcaggcccacaaatgcgggcagcagccctcccgagggcctgcccagcctctccacactctggctaccaggcttcttccagggatacaggatgaagtcttccaacgtgggagctgggccaagacctggggctgctcacccagaagtggggcagaagtaacccttggcccatgggatacaggtatcagtggatgcaggcctctacctgtggcctttggagggacaattttgaggggcattctgcatgtacctcagggggtcccagacaccgcgagcccctgtcacctgcagccataaccagcccagcaatgcactctttcagaggaatccgagttaagatagtttgctgataaagaccctgcagctcagagaggtgaagtaatttgccgaaggcctctcagctgctgaaggacactcagggattgaagaaggacgaactggctctcatgtcctgctcctgaccactgcactaccaccttcttagagaaaaccagtcggaccctccaggcctgtggctggttcttgctttctgcatctgaacctgtcagtgagtccagaggagggctcgccaggactgtagccaaaaaacaagagtcccatacgtgcactagagggtccaaagagagcgcagtcggcgggacacctcctccttaatttgggcccaggatgccacacagacctccggagcttacctgctcttctccttggaagggacagatcagagctggaggggcttcgagctccctctaggggccagcgagacctgtgccagccccagagctgcagcaggccccgagggcaggcgctgaggcctttgctctacaatgggaagacgggagccgcccttccccagaccccactggctggggatgaacagaaggctcataaagaagagttgttccaaaagcttgcccttcctgggacccagtgaatcccccattgcctcaagacgcagggcggagagctgatctgctcaggatgtctggagcgagcggggctcatgggcaggcgagggtctgggtgtgaggcaggcggcgtgcgaggcttgcctccctgcagactgtcacgctgggggtctcactccccttcctcgtcgccccttcccaggagagtggacacaggctaggaccccaggcctgtctgcagcgtggcctccgtcaccgtctgtgggatcctgggccatcaggcagctttcctgggtctcagttttcccatgtacacctcaatagccacaatatggattaagctgtccctccacgccaggcctttcccgcatcacaaaagctccacggctccagtgcttagtggtcatccccattgtagagctgagggaactcagatgcagagaggttgagtaacttgcccgaggtcgcacagccagcccacacccttgcgaggctttccgactccagaggccacatggagttctatgcgtgacccttcctctacactctttctttctggaaaatattattttagagacagccttgagcccaacacttctaggatccttaattgagcccaacacttccaggatccttaatctgcaaggatgtagaaaaagaagcctaaatgatccctgagttttgagaggctgtgcagataaactcatcacccctgagcaaaatggaaagagtgaggagtgaagagcaagggcacagtgggacagtgatgggctgcccagggtcctggcactcacagggtagagaggtcagcaggtctgggaactagagtacgctggatccctgggtgtgcctgcaacccctcaccaagacactccctgaaacatccccagggaaagacccatcatggcctgagctgcagccatgaagatttagggatcatgtgggagagaaaagttggaaccaagggcccacactcctcaggaggggtgccaccccacctctcctcacactaacccagctctgcagtcttggcaaagtcctgggagaatgaacagagtcccccatgctcagcagccaggagttggcaggaggatactgccatggaccccttacatggccacagccaaggagagctgctgtggggcacacctgcccttgtgcagggccaagagtgacctacatggctgttccccacagggcggagacccgggagagtctctctagcctctttttcacagcctcccctgaagccactggcatgtggccagcgagacccactgccctcagagaccaatatgtagccactgacctctgtcaggagagaagccaaccagctcttgctctctgcccactttgccacccctaccattatttttggggccttttaatccctccataaacccacctcataaagcagagtatcagtgcttctcagcagtgtccagaccctcccccagaggaccagatcaggagggaaaggaggagggactgagtcctacacagtggctggcacccctcccttaccacttgggctaaaatcccagttctttccgtctgggcctgaagatctgttataaactgtcccatccctcatgacctcagcttcagcaggggagtccagcacccggaatccaggaagaggcaggaaagcgtctgctcacatgaggagtcacatccattgcggtgcaggcccccggaggggtcagggctgctgtgctgttcccatgttcccagctaggaccctgagcctcagacagggccaccaagcagagccaggccaggagcccgggctcctgatgacacacttttccacatgtccatcccacacactcccagtcagccccttgctgtccactcacccaccccataaacacctgcagagcactgaggctggaccctgcggaggctgcctgaggcatctgaaaccagccaggttccccatagaactgatgtttatggatttattttcataaacatagaaattgaccctcccagtcttaaagcatgaaacttacatttgtcttatctgagttcctttcccaggaaaccaaccttcaggcctcctggatagtatcaagaaactgaaaatcctcttctttacccctctggaagcctattccttactacataaactcccaattttagtcaattgggaggatggatttgagactgatctactgtctcctcagccccaacacccgaaaaagccttcttccctggcactactcattgtctcggtcactggctttctgtgtggcaagcaacaggacctaaaccaaaacctggtgttttggtaacacatctgtagagtctaggcaggaatctggaccaagtgctccttggggtcaggaagggctcaaacttgctgggccccccttatgcccagaaatgcatatacagtggcctcgggtctggaattctctcccacagggcccagaagaaggctgggccacagacacaaggaggagtatgaaaatgcacttgtgtagcccacatgattaaataacagggaccacacacacacattgtgccaatgtcaaattcctagttttttatatcgtgccatagttatgtaacagtggagcagcaaaagaactaacagcactcactccatttttgtttaaggggcctttacctgttcctgcaggtcagctagaataattttaaagcactgagataaaatgcaaaaattgcattcatgtagttcttgaaactgtattagtccatctttgcattcctttaaagaactacctaagactgggtaatttatgaagaaaagaggtttaattgactaacagttttgcatggctagggaggcctcaggaaacttacaatcatagcagaaggtggaggagaagcaaataccgtcttcacaaggcagcaggagagagagtgaagggggaagtgccacttttaaaccatcaaatctcatgagaactccctcactatgatgagaacagcacgggggaaccccccaaccctcaccatgatccagtcacctcccaccaggtccctccctaacatgtggggattacaatttgacatgagatttgggtggggacacagagccaaaccatatcattctgccccggcccctcccaaatctcatgtcctttttgcctttcaaaaccagtcatgccttcccaacagtcccccaaagtcttaactctttccagcattaactcagaagtccaagtccgaagtctcatctgagataaagcaagtccattccacttatgagcctgtaaactcaaaaacaagttagttacttccaagatacaataacggtacaggcattgagcaaacgctctcattccaaattggccaaaaccaaggggccacaggccccatgtaagtccaaaacctggcagggcactcattaaatcttaaatctccaaaataatctcctttgactccatgtttcatatccagggcacgctgatgcaaggggtgaactcccaaggatttgggcagaaactaactctgcgattgaaggggaagtgtgtaaataattgtgttttgttcaagatttataggagcactgtgacctgacctaggacagaggagttcccaacctcctgggaccttcacaggcacccagatgtctgcagctggtcacacgtcttgatcccaactcccttcttttccccctgccctcaacatcaaaagagcctgaaatgtgtgctgacttgagacgacctttgtgacactaacccactgtcttctcaggttgctgtctcttgaataaacctgcttttccttctaccaagtcttgtctcccaaagttggctttcaagtgtggagcagctgaacctgggttcagttccagtttcataagatgtgaccaggagaaaagcaagtgaagggtgcactggttttctatctttagggacctctcttactgctgtctttgcaatttcctgtcaatctataatgatgccaaaataaaaaccgattttaaagtcctcacagggaggtaagactgtgagatgtttctgtgggatggtggtgtctgccaggaaactgaccagctgacctggtgagtctgccaagaaggtgccaagctgtacagatgctatcctgggcagcgtcttcctgccccaggctccagttcagggcatgtctcgcggttctcttcttgtccattgctgccagtttgcaaagacaaccccataggagaacataggctcctccatgtgaatagaagagaccctgatttatttcttggatggggaaagatcttggaggggctgcaaagacttacaagaggacagtggggaaacgattacatgtcagggtgtttcattgtctggggcctcagcagcccaatttactgttcctgggaggatcagaacaagggccatgataaaccaaggactggaggtgagcaggggtggatgtgagagggactggtgtcaggagaaatttgtgcaaatggctcacaacagggaaaatctctagttaaaaataggctaacatcattcccagcagcccattcctttcccactgtgctccccaggaacaatcccactcatcatgataaaatctggggaaagagaaaggctggagggcaccacccccccgcccctcagtgcagtgttccagggcctgcccactgcctggggaggcgatgccagcactcatctcacagcagagcatgtaccatcctgtgccatcctgagcactccttgcacactgtcatttcctgcccatatcaaccctctgaaggagggcccatttcccaggtaaggaaaccgcggccgagagagcttacggaactcatttgaggtcacgcagccaggtctatctgacctcagctgattctttgaaatgctgtgtcaggctgcccccagcagtgacaaaggtgacctaggatggagacatattcctttaaaacagctggagtctccaggggtcaggatggatgcttgagtgatgggtgcaggcagccgggcccagaaaccctaaggtgctttctctgccattactcagagcccctcgatgtccccccaaccctttccaaagtccctcagcctccatcatgtttgatcctgaggaagaagaggtctgtccagccccattttgcagatgatgaagctgaggccagagtctcacaacagagcagacaccacatcaggccttctgactctgggccgtagaaaggctctgcagagaggaggtgtggggaggactcctgtgaggcctggcagggcatgggatcccctctagcagtctcaggctataggcagcagaggcagagagtgagcctggcaggggttctggagctcctggcctcttcctcggcctaaatctcggcctttgcagcatgcgcatgtcagctgcacctctgacctcaccaggggctgccagctgactctgatttacctggagcttcctgcttcagggacagtgaggagccagccggcctctcctggatctgcacccagtgagctcccattcctaccctccctggggcctgggagctcagggaaggcactgggctggaacagcaggatgggctgagcccatgggccatggcactggggacccaggttcctgtctcccccagaccactagatgactaacagtgaaacagcaaaagaactaacgtcactcactccatttttgtttaaggggccttgacccattgctgcccacaggctaagataattttagagcactgagttaaattacgcaaaaacagcaatcatgtcgttttttttaagctaacactgaggctaaagggaagtctgtcaacaaccaactatgttttgttaaagattacaggagtattgccacctgaccgaggacaaatgtgttcccaacctcctcggaacctcgctggtgcccaaacgtctgaagtcctctaccacctcttaatcccagcccccttttcttttccctgcccttaacttaaaaagaacctgaaatgtgtcctaactaaagatggtactttaggacgctagtccgccatctttgtggtttgctggctggtctgaataaacctgcttttcctcccaccaactctcaccccttgtgtttgatgtttaagcagtacacagccgaactgggtcctgttacaactgcagctgcttcccatatctacgggatccccattggtgtggtgctgaccgcctggaagtcctgcagggactcctaactgtgaggcacgtatcccaggagcaggtcttggcctggtaagactgtcctaagtcagaggctaacagaaagcctccagcctggtaggatttgaaaggggatcctggaaaagtccccaaaacctcccaactatgcctgaaaactcagaggtctgcaacagcccccagcccacctgaggaggaggtctgcattactccacctccagggctgtctgtcttttatcaacccggatgcaggggcagctttcagggatgcatggtatggggcggataggagctactgggatgagagcggggctgcaaggggagggggcagacttccctatccttgtcctacttcattctccctccatccctgcccggttcatgctcccattcccacttcacagatggcccggccacaatggtgaggggtggctgaagccaggattcaaatccacattacctcactcccgagctcttttccccatgcaggactgcaaggaagagaggatggatggacaggtccacattgtcaccagtccaccaccgtggcccctgggacacagagcccccactcagcccacctggtctgccatggacaggataagttagcaaaaaccaagatgaacaaaaaatataggaaatctgactataagttaataaatttgatttgctacagaaaatgcatctactttttcagcattcatgaccaaaataaatacttttgaccacaaaaaataccctctataagttccaaaatcatataaaatgatatgggccacattctttcatcacaatataataaaactagatgagaataattaatgtttaatgttaaaaacctaatcatttagggttttgtgtgtgtgtgtgtttgcgtgtgtgtgtgttttggttttttgtttttgttttttttctgagacggagtttctatgttgttgcccaggctggagtgcaatggtgtaatctcagcttactgcaacctctgcctcctaagttcaagtgattctcctgcctcagcctcccaagtagctgggattgcaggcgcctgccaccatgcccagctaattttttgtatttttagtagagacggggtttcaccatgttggccaggctggtctcgaacccctgacctcagctgatccacccacctcggcttcccatagtgctgggattacaggcatgtgccactgcgcctagcccatttaggtttttttaatttaaaaaatctaaaagtctcctacaaaactcttgggttaaatagaatttgcacactatttagaaaagaatgacaatcttagcatcaatcaaagcttacaggattcaaccaaaagtagactcagaggaaaatgaatagccttgtttgatctcatgactaaacgagaataaaaataaatgaactgaagagtctactcaatcattagaaaaaggagataaaatgtagcacaagaaagtaggagaaagaaagaggcttctgtctccacctgagcaaaataaatgctcaggttcccatttcatttacccacagacagtttgcacacagtaaggcaatacagatgcttgagactctgctgtagatcattttacttatggaatctgtttaaataaacattatagaatatttcctgacatcaaaaactattttctacgtaaaattattttctatgtaaaacattaaatgaatgtagcacaacttcaatgtcagagccagactaaaacttgtgaatgagtatccttgaccccacccactagaacaagtccaaccaatcagacagaaaaatctctgacagaacacctgcgtgtgctctctctctctctctctctcaaccccagatgccagattcaaaaactaactaaatcaccaccatacatataaggtttgttgtaaccaacacagattatttgaaaaggtgaaccgatgatggtgataattaggtgaattcatactaacaataatcattaaatattaaaagtataatttattttacaaaattgcccatgcaaggccaggcgcggtggctcatgcttgtgatctcagcactttgggaggccgaggcgggcagatcacaagatcaagagatcaagagcattccggccaacatggtgaaaccccatctctactaaaaatacaaaaaaaaaaaaaaattagctgagcgtggtggcacgtgcctataaccctagctactcaggaggctgaggcaggagaatcgcttgcacccaggaggcagaggttgcagtgagctcagattgcgccattgcactccagcctgggtgacaagagtgaaactccatctcaaaaacaaacaaacaaaatgtccatgaactgaaaagaccataatgagggcagaaagcctgaatcaagtactacagaaagttgaaaatgagcgattttgaggaacacagcatgctgtctgcatgagtgtggcagaggaacccgctgactccagtgctggctgaggtgggccccctgacacgttagtcagggcagctgactccctggcacctgtgaccacagggcgcatgactgaagaccgagagcctccttgtgcttgtggtggtgtctcctctgccagcagtcaatgaataaactccctggggacagaggccagaccatggagccctccaggaagcttactgtcatgtggggcctgaagtgagtgcacgtcaaataataatctctacaaaacgttagcactattggaaagatcccactcttatcaagaagcaaggccaaaataataagagatgctgaggaagtaggggaggtggaagaggaggaaacgaaggacagggaaaaagaagaggaagggaaagaaaacagaaggaagaaaagaggaaaggaaggaaaaacggaagagaaacagcatattatatgcgaatgtctgctagcgttccatttgaacacacctgctaagcaatttttagaatccttcagtgtccacctcagaaccttccagatcatcctcatctcatatgatccacccttggcctgcagcagtgattgtctgtgtgacccacacatgtctgtgttgattataattaacttaataaccactttatttttaacaaatttattgaggcataatttacataccataaaattcactcaaaattactttaaagaatgcatcatgaacaacgagaaaagaatgtctgcaaagttctttggggacctgcaattaaagcatgcactgaattgcacctgccctgagaagtggctgccatggactggaccctttgatccgctttttaagaaagagccaagggcatgtggattccagggggcaggtgcgaccgcatgtgctcaggttcctggacattcttgcagtacacagagcagccccacttcatcgcacatattatttctctgaacactgctagaaaggattgtgggctataattagaatgatgccccacaggattacattcacaaatgtaattacataatcatttagagctgactggcacaggaaacgacattgcttcctaagtgtggagtgaggggaggtgctgggcacctctggtggagctgggcattctgagactcctttctcatgccagctgagcccagaaacagttggagatgagtccaaagatccgtaattcttcactggatttgtcttggtcatcagtctgtatcccagggtcccaggtttggggttacacacagtgcaaaactacccactagtggccgggcacagtagctcatgcctataatcccagcactttgggaggccgaggcaggcagatcacctggggtcaggagttctagaccagcctgcccaacatggagaaaccctgtctctactaaaaatagaaaaattagccaggcatggtggcacacaccgataatcccagctactcaggaggctgaggcaggagaatcacttgaacccaggaggcagaggtttcagtgagctgagatcgagccactgcactccagcctgggcaacagagtgagactcagtctcagaaaaaaaaaaaaaaaaaagtacccaccagtaacggttgcaccttgagttgttgtttcaaaaatttccagcaaaaagctcatctctggtaaaacaaaaactgattggatccagagatgaactctggggaactctcctagttaccatactagaatccatggccagagaggaggctgttttctctacatgcaacatatgtggaagcatgatctacgatcgccttgactccgcctctgcatgcaatgactcagctccccagcccaatgcaagccctgctttctccagtgtttagaaaagcactgctctgggaacgatccccggtgttgtgagtaataaaagccaacatggttgtggtcattgcactgccgaccaccaagccatcaaacccacccatggtgtgggtgacaagtccaccacagaatttcatggatgatgtggaaacttcccaagacgccccaaactggacttctcccctggctcctgttaaacgcaccaggaaagtgacaacgggcttggcatccatctgttcttcttgtttgtttgatagaaatcctgtctgtggcacatatgtgattgcaagcacagagtgccggccacattagaaaagtgcatagtgtctgttgtcttactctcctgaagcctgggcggcactcagtcctttggagtttctccagcgttgtctagctgcaggtactgagtccgtcctatttcacacagagatcaacgtggcgacacacgcctgggcttcctgacacatcctgatcttgcatcacttcattctctctgatggcagtgattttgttcagtatgccccactttccacaattttctaagatcttccatatatttgcatgcatgactgagaagaaaatatcttttgttggtccaagtgtcctaaatttgggtccaaaaaaaaaagtggtagctgtataagtagaccacatcttttgaaaaccatgatgataaatcacattaatttggaccccattaatctggactatgtgctaatcccataggcctaagaggaagcttagcttagaagaaagggtttgctttctaagcaaagaaagatgcaaacaagccacagcaagcgtaacctacttagaagcagatgctgtccttaaagaaaaaggtgtgcaataagctacactgcctgtgagtcctaaaccccagctcatcctccaccttcgccatcagccagcctacctacagtgtcctatgaaactcgagtccctcacccattccaagcaaccacagcacttcctccaaaactggcatcagaagtggaaatgctcctggaggctccctggtcctgtagcctccttggggaaactgaagcccagagaggggacggagccagtccagagtcacacatccagcaggtcagcctggtgattagagctcaagttttgactcctccagactgagtttttaaactcagcctggactcttacttggggatgttagacaaattccttgaccccatcgagtcaccatgtgctcatgtatgcaccgcagagggaggcaggagcctcccttcccactgaggtctgggtaagactggcctgagctccaactctgtactctgtgtaagtccaaggccctccccaagatcactgcaaatccttgtgctcatccctgtcccagaatcctgcttccctgacactgtctctgttcctcaccacgttgactcaaatgagaacacccagccccatcctcaacatgcacacacaactgtttgtttgtttgtttgtctgtagatggagtcttgctatgttgcccaggctggagtgcagtggtgtgatctcagctcactgaagcctccacctcctgggttcaagccattttcctgcctcagcctcccaagtagctgggattacaggtaaccatcagcatgcccagctaatttttgtattttttagtagagacagggtttcaccatgttggccaggtgggtctctaactcctgacctcaggtgatccacctgcctcggcctcccaaagtgctgggattacagtaggcgcaagccaccgctcctggccgcacacacaactttctaagtgttgcaggctttgttgaagggagtagacttgggttgtgtccttagcaggacagaaagagggccagggttttgtactcctttgtcactcagctgtgagctatggggagcagggggtgtagtgagaacaaagtgattctggggtgtgttcatccactttgtgttgctataaaggaatacccaaggctggggaacttataaagagaagaggtttgtttgactcatggtgctgcaggctatataataagcatggcaccagcatctgcttctggtgaagcctcaggaagcttccactcacggtgggagaagagggaacagatgtgtcctgtggtgagacagggagcaagagagaaaggaggaggtgccaggctctttttctaaccatcagatgtcctggtaactaacagagcgagaactcactcatcaccaaggggacagcaccaagccgttcatgggggatccactcctatgaaacacctccccccaggctccacctccagcattggggatcacagttcaaaatgagacttggaggggacagacatccaaactatatgaagggcaacagccaacacacagcagccagggcagggagcagcagctcaggaactggggctaatctgggcaccaccagtacctgccgcaggggaggaggtggagatggggctctctagctctcattgcaaagacacacttagcatcaggcaccactgttcttaaaacagccttggcctgcactctcacccacatccacaccaccctcacaccctcttgcccctttcctcaatcctctgcctctctttctctcgtctccctccctctagagaacaacaacaaaaaaaaaactcattttcttctgcagaacaatttaatcattctttaattcctctgttgctgagctgctgccaacaccctcaatgtggcgacccccatcccaggttgccagttttagagctgaaagtcccccatcccaggaaaaccctcagtcccaagcaaactggaacaactggccactctccaaactgctcttccagcagccacggtggctctccaggctccctcccaaatggacagtaagtaggaactggctaagacagctaatcatcttttctttttaatcatgaatgggtgttaaattgcatcgaatgctacttcagcctctatttggagtcacatggtttaatctaccaatggagtaaattacattagtagatttcctaatgccattcctttgttgctggaataagtcacactggaacacgctgtatgtatttttcttgtgatcacattcttgatttgatagactaatattttatcagtaatgtttgttcctaaattgagtttcattcaccgtagtctttggccgcttttctctgatgttggtgcctggaacagacgtgccttttaaaatgagtgtgagagcactcccactttttcacacctatttccttcctgcctggtctgggggcatgagtgacaaatgaaagaagaaaggcatcaaaagacataatataggacatttgtttcaaggtgaaggactttatgtttatatccaaaaggcacaacatgttcaagaaaaatttattggaaatgacgagcatcaggaaatacaatggttaaagaaagaaaataattcttcatgcactcacagaggaaaaagaagaattttcgggggaagggaggactcataaaatcatgctggattcagattcttcctcggcaagtttcatccagagggtaacggagcaacatccacaaatcacagtgaaaataggaacccgtaatgctgtggtcatctgacttgtcattggagccaaaaagccacaggcaaacattctcaaagagcctggaagaactcagggagtgccgcagccatgtgcgtgtctttaaaatctctgtgatagttacatccgggcaaagtgaatcacaaggaaaaggaaactggatattggggttgggggagggaagatgcagggaaagaaagggagggggagggaatcctcacactagtgcaaaacccatggaaaggcagctttaaagggaaaaccaaatatgcttcaagttgtccttaaaatataaaaatcaagagacaggcattctctagcatgaaggacacaggcaacacagaacccatgatgcttgaaaagaaagaaaaaccatttcacaataaaatagagcctcaacatagaggaaaaagccttggaatggaaaagtcatgaaaaaaatgatgagaactgaatgcaacaaaatgtagaattaaaagaaactctgcagaagagaatccaaacattataaatatagacaaggtaaaaagactagtgaacaaaaattagtaggggaccttcaggaaaaaaaaaaacaaaaaactcctaatttcctcacctttcaacagcacagagcccgttgaaattgtctagaatggaaacatcctttaaataaaatgactcccagcttattttttccataaccttttttccctcaatcttcagaactcttttaagaacgatggttttttgaggcaaagaaacattgctctgaaattcaaccattgtctcagtttcacttcagatatttcattgctgctattaactaagaaaaattcaaccattttattttaaaggagtatgtgggccaggcacagtggctcctgcctgtaattccagtattttgggaggctgaggcaggaggatctcttgaggccagaagttagagaccagcctgggcaacatagcaagacacccatctctattttaaaactttataaaacttagccagacatggaggtgcatgcctgtagtcccagctactcaggaggctggggtaggaggatcgcttgagcccaggagtttggggctgcagggagccataatcacaccactgcactccagcctgagtgacagagaccctgtctctaagaaataaaattaaattgaaattgttccactttatcacactgctcctattcatgtatctgatatattcctagagagacatctggaacgaccactagttaattttaacaattatttctggatagtgagatgttgaattgtgtataattattcttttttcttttatttttgcttctctttcacttgaatcatttatgaacatgtaatatttttgtagaagtaataaaggcattatttttaagggagagaaaggaagggagggagggatggaggaagggaagaaggaaggaaggaatgaaggaaggaaggaaagaaaaggggaagaaaggaaggaaggagggaggaaagaaggaaaaggaaggaaggagggaaagaaggaaagaaagaaggaagggagggaggggtggggagggaggaaggtaagtaaggaagggatggggagggaggggaggaaagaagggaaggagggaggcagggaagaagggtaggaaggggtggggagggagggagagaaagaaagggtggggagggagagcgggaaggaaagaaggggtggggaaggagggaaggaaggaaggggtgggcagggagggggggaaggaaggaacgggtggtaaggagggaagaagggaagaagggaaggaaagggtgggaacggagggagagaaggaaggaaggggtgaggagggagggagaaatggagggaaggaaggaaggggtggggagggagggaaagaagaaggaaaggaaggggtgaggagggagggaaagaagaaggaaaggaaggggtgaggagggagggagggagggaaggaaggaaggaagtgcgccaaagctcttaggcctgaatgtccaactctcttatctgccttcacaaggcccaagcccctctcatcagtggccaccttcctagacacccacatccctgcagcagtgtggtgacgccagccaggggctgctctgactctgactctctgaggcgcctcaggaggtggggggatatttgacacaacagactccttatcaggctatgattttgcctgaaaagggttcagcttttgtctccccttttctcttccatagccctggattcacttcagaaatcaacacaggaattgacaggagtcaatgggccatccctgaggtcacagtggtcagagccctgggctgggggtcagaagaccaggctttccctggcctcactgcgcgaccctgggcaagtctcccccagtctctgggactctgttttcccctattgaataagagggcctgcggctctgaggttccagcatgcagtgaactctcattagcaatggtaaattaagaataggcatatgggccgggcatgctggctcacacctataatcccaacaatttgggaggctgaggcaggtggatcacctaaggtcaggagttcaagtccagcctggccaacatggtgaaaccccatctctactaaaaatacaaaaattatccgggcttggtggcacacacctgtaatcccagctacttgggagtctgaggcaggagaatcgcttgaatccaggaggtggaggttgtagtgagccgagattgcgctatagcattccagactgggtgacagagcgagactccatatcaaaaaaaaaaaaatggcacatggtactgggctggacggtagaggcttccacccgaggcccaggcacaccccccgtgtcagaccccattattggctgctggttgatgaagtgtagatgagctcaggtgggttcagaaacttgcccaagggcatccagctagtagtcgagtcagaaacaggatctcagccccatcctgtctcgccctaaagtcttattttcagttgctactccctcagttgcccctccctgcagcacccctgtccctgagccgagtttgagcaatggcacaggggtaggcctctgctgctggcctagttccatgccctgggacagaggggagagacaggctcagtccctccccagggccaagcagcttgctgccgcccaggaggcactggtagaggtggccagtccagggtatgggaggagagggctgctgaggcaaggctggcctcctgctgaaggctggggctctcctggaggggtgggcaggactggagggaccagatgtggtcaaatgagagcagtggagggactaggcacaaccttctgggaaggaggcagcttggggcctcctccccagagcttcttcagcaccagggtgcctctcagagctgaggaaggcctgaagtgcaggtcccagcatggaactgggatagtggcaagtgagaggagctgcagccaggacagtgctgggcaggaccgacgtgaggagggcccggagagctgccccatcactcatgggtccaggcagggcccagacacacccctgtccaggaggctgtggaggggatgcctgccagtggggacggtgggctccatcacccctgcagagaacacatggtctttctactgcccagatctgccacctcccaaaacgacaccttgctattccttgggctcagcatgcttcaccaccctcaagtcgctgtggttctgagagatgcatgaccccaatctggccagttaggacgccccagtcccctggccactgccaggggttcgggtatagaaacatgacttgacttggttgaggccactcattctaagacttttgccagaatcactagggaagggagaatctctggattaaacccaaacagcaaagtagacagacacatagacagggagagagacacacacacacacacacacacacacacacacacacacagagagagagagagagagagagagagagagagagagagccagcccctggatcaagccatgcctgaagcctgaccttttgttgactgagtcgataaatcgccatctttgctttataagtatatgatatgtttctttttcagctataactgcaagcatcccaataaagcaggttcctgaggcccttccagttgggatttggcaacttctctatcctataaataattccctgctaggcgtactactgtttctgattgatctcacctgctcaattctcaaggctaattatgaagtaaagcagtcaacacgtggcaaaagtccctgagccgacacctgggggaacaaaatgctaccatgtactggctgcacatgaccgaaacacatgcccccatccagtcaccaggctcacccttcaaaaaagccacctctggcaaggtgacagaggccaccctctttgcccctgggcctacttctgcttcaaaagacctcgagggaagggtctcaactctcccactaattgctaggaaggaaaattctggggtggaaagcaggaggggtcgggccaagcaacactttgcagaggacattggtcaaggcccaggctgactttcccaggggagcaggtgctaaggggctactgtgtgtggttggcaccaaagcctgctgtttgcagacagtgagttggaggaagcttgaggctcccaaaagcccaagcaaatggggtgaatgcaagggtgagaggcacccacccgcacctgcacacatgagcctgctgagtccccactggaattccctgcttcccatgcatgtcatggggacctggctccccagccaattgtgagctcggggtgaagagctgaatgtggcctatctctgaacaccctcagcccagatccccgcctggctgggtgttcaaaaccgaacgaacaaatgaacgagtgaatgaatgaagcaccttccacgtgcctggcaccattcagggctctggggcttacaggagctgaaggcaggcaagggctctgcctgggtgctcaccttctctcagagcatacctctcagcgggggaaggtggccatctagacaagggccgggcactggtgacagcaggctgccttgggccacccctgccagttaggactggctgaccttctaactagcactaaatgtctcctgtccaagctgatttcttcaagtgtctgccccaggcatggcatttcaaacttccctgagcagaatgacacagaaaagcacggtgaagtcttgggggatgagaagcccgtgggaggaggcagcccttgtgattcctgagttcatgcagagattggacccaacgtggtcccccagctgtcctgtgctataatgggctttcccatagagtcctcatgggcagctcagtgtcacaaaccattttgctggaatctagaacctgttgctaaggccaggcctgggtgtgacctcagggggctgaggactggtggtcctacacaaataagctccctcttccccagctaccagccctgaagctctgtgaggtcagaacagcaggtcctgcgggatcccttctgcagggccatggcatcccctttgtttttatatttgcatgtaaagaaggccactcaggtgctcaaggtcaaataagcccaggtgactttccatgctagccaactccttccttacaaagcagttgagttctacatccaggcaccggtgaccctcccaccatctcactgatctcgagatgcagggaagaaatggatcaagctcccccttcaccaatggagaaactgaggcccaaagaggggagatgatctgcccaaggtcatgaagagatggcagcagggccagcaccagagctgccactcctgcgggctcctggctcagtgcttttcccactgtgccatgatgtgaagctggtagtcctttttctctcctactgaaggaactaaaacacagccaaactgtcaaaaatatcaggagcaagatgaccacactccaaagaagcaacagtttaatgattctccacaacgccctaactgcttgaaagatagtgcattcttcaaaactgccccatgccgaacagcctaccaaatagcttccaaagttgcagatcaaatcattgctgatattttgaggagctccgtgtcaatagctgatgttaatattttctgagagacggcattgtggaacaaatgcaaaaccaatgccatctgtctccaggaaacagctcgagattccagacatcggagaggcctgacacaaccaggttccggcacgagaacccccacagaggtggagcaagatgggaaacaaagagatccatttctggtccagaggaatcctcccctggttcttagaagacaaaattagtgagatctctgaatgattcttcctctttaaaacgctgagcccaaatgcgtgtttgtgatatcatcatcacatttggcagcaggttggcgtgtggtcagatagcaggagggacttcctcagtaagagatacagagatctgcaagagaccggccactgaggctggttaccatgaatgcccgttctcccaggaccaattgcctgaataagacagcctccaaaggcgcctggaggccgaggactcttagaagactgggtcagctggtatacccatcagaagccggctctgggaacttacacagaggggattttcaggaaggatactgaggcctcacagactcactatgcagggagcaacttgggcttgggaaatggtccatggcagctcctgaagtccaggccttcagatgcactgtgaccactgagtcagccctcagaagactccccaggaagcgtgcagcagagccccagggtggcccgttcaggagggcatccctgcggggatgacagcactcagcaaactgcctccccgcagatacagccactccagctccggagttcctgaagacctcagaggctcttaaatggcgagcatccttggctacccagcacggaggctacttgtgtacatcttgtttctatggtaaccccattccccaaaccctaagcaggacataaggttagatgagacagacacatgtgcatggggagcaaggagcaggttttaagcctggagaactcgggtgcccagggtggctctggcactatctctctgcggtggaccgtcccagtacacccgggcagctctgtgctcccagctgccctgagcatcagtgtcatgggctgaaccaacacacagggcagccccagccctccctgctccaacctctgccggagtcagggctctccaagacagtgcagctgggcaccatggtggtgaccggacgccaacagctcaccgccaccccgttccctcggatggacccatgtgcctcgtgcagtggaaggggctggctcttgtccttttcattctctcatcagcctggttcccctgaggactgcctcagtctcttgattggattggggactgccttagcatgctctggtgacaagtgacattcgtcgagtggtgggactggaacagatatgccacagaacagacgatggggctgctgccatcggtcaccaggattacaaggagcgggggccttggaggctggacgaatctgtcttaatgtaggaatgacagtcaggacccttggtgacaagtgacagaaacacagcctgagccagatcagggaagagggagggcttgtaggtttacaggccaaacctcaggaaaggctggcatgctgcggacagctgggatcaccaggatagtctccatctctcatccgcctttcccaggatcagcaccacgcttgcagacctgtcccctctgaagagcttggctgtggcagccacaggtcccagctcacaagctcccagcctccctagggtgatgaaggctggggcaaggccttttctcagcccccagttgaaaactcctgctgaggtgctggcttggagcttggggcatgtgcccttccttgggtgccagccccatccttgcccccaggacctggatggtgagtaagggaagatgtcccccccaagaggaaggatgctgctggtgccaacaagaagacagcactcagcaaagtgcatgatgcccacttcagggccatggcctcagagcatctccgtgtcagctctttttttttttttttgagagagagtctcgctctgtcgctcgtgctggagtgcaatggtatggtcttggctcactgcaacctccgtctcctgggttcaagcaattctcctgcctcagcctcccaagtagctgggattacaggtggccaccaccaagcccggctaatttttttattttttagtagagatggggtttcaccatgttgtccaggctggtgtcgaactccaggcctcaggtgatccacctgcctcggcctcccgaagtgctgggattacaggcataagccaccatgcccagccctgggctcttcttactggcaagaacagaccctgagtgtggaccctgcacaggctttagcatctggacgggactgtgagtctgttttatgttgccagagaggaatgtctgaggctggagaatttatgaagaaaagaagttgatttggctcacggttctgcaggctgtccaggaagcatggcgctggcatctgcttctggggaggcctcaagaagtttccaatcatagggaaaagtgatggaggtgccagcatgtcacatggtgggaaaggcggggaggggccaggctcctttaaacaaccagctctcaagcgaggtaacagggcgagaactccctcgttacctccaggatggcccaagccattcctgagggatctgcccccggacccaacacctcccaccaggccccacctccaacactgagggtcacatttcaacatgagatttggcggggacgcacacacaaaccatctcagggtgttttcctggcttcatcccgaactgcactgatgtgcagtggaaagaaagtgggggcaaaggtgcccctccccagaaagatgtgccctgagcagggccctcaacccctcagcctcagagaagcacacactcatccactgagcatgccaggagcccccatgagtggggtcggagggagaagccggcaggtgatgtacccttcaagtcactgggcagtgcccagacccaggcaccctaccacgcccacagagcagcagccagacctcccgaccccaccagatgccccccatcctctcggcctctccaaccccctacccggctgtaagctcagtcctttcatgaatggaataggaagtgagacaggggagaaaggacacgggaggtggtggcgagcaggtcactggtgggcaatgggggtttgagcctgcaagacacccctggcaactgcgcaggacacatctcagagctgggccacataagacgggaggaagctgcggcatttatccatccactccattcatccgtcactggctggagccactcctgggatgccgatgcccacacgcctccgtggctatagggagcccacaggctgagtcacaggaaccgagggtaaggtggctggtgtgcagggtggccgtgcgtgtccaggaggtacagggggcatgccaacagcatccactgtgtctccaggcaggcacttctgcagggctgagacaagccccagtgacagggagggggcaggcatcccagcagggctcagtcccagagagaaacttgggcctcattcaaaaatgaccaacagtcagcaagggtattggggtgctgcatttcctgcagccaccatgagcctgggaagctgactgcccaagtggcctgcccggaaggcgcacttgccccagaatagaactctctccaccaccatgtccgtacacactacagggtggggacacagacacaatccaccctgttacatcaagtcagataactctcttgcctgcatcataattaactttactttcttcaaaggaacacattaaggcaaaatgttggggatcttttaaaacaaagccattttcctcactaggattatttttgatgagctaagtggtgttagtttttaaattgcaatcgagagagaaagcacgcatgcacagagccatcgacaattttcatttccaacaattgcagttgtgaatcctgctaccaatgctgctaatagcttccgtggtggtttatactgatttgcctaagagccaaaccccaggcttctgtcttgaagaatcaaagggtgactcgggccaattagtgcacatcttgaaccacaccttctctggaaagaaagcattcttggcagtacccacttatcagaatcgtggggtgttctggagcccctgatgggaaatggagtggtttagaggaagaggttaaatttgacctgttggatcgtgacctcagtggagcattgggggacccagtcattgactctccaccctcaagaatacaaaatgctccaacatggaacgttccagtggacggcggcaaccggcatgctatgggctcctttaaaaataagccccattgttccccaaccgcctattaatagcttgaaaagacatctgttcctaatttggtcttctcaaaccaagaaatcttcccttcactttcctccagggctaggatgaaatcaatcaagctacaaaatttattaagcaccagacacattctgtcccagacctcagagccagccctgcaatgtggcccaagcactcgaaggccctggtctgcacggagcatgcacccttcctccagctcagatggcactaaagagcccccagggtgagccagtcccacccagttcagtgccccagctccctctgctccgtcccctggggtcagctgttcgaacagtttctgactcgaggcatagctcccttagattctgccagggacgggcagctcactgtctctcagatgacccctctcattcccaaatatctgcagctgctaaacactcccaaactcacctcccacaatcagtcccatctctctggggccacacgcagcaggttgactcttctgattatggcaagccttcagctacttgagtggagatgtctgcccgtccccatgactcctctccagctttggtacctgggtagcagggggctgttggggacccaatgcccagacaggacaagcgagtccagggacgtaaagccacatggacgcccattcctggcagcagcttcagcaatcatgtatcctccacgccccctgcacccactcctgcagtcccagacgcacagctcaccattttcagggtacacggtgctcgccacaccccggggcctttgcatggctctccccacttcccagtatgctttcctctgctttctacaaagctgttccccaaccttgtcatccagtccccagtaacggtccctgaccttgctgctcaagtgcacccccagtcacgcccaaagcacacccctctttcaattctctactgtctgatttttctctttattcacatttatcatctttctgcccctctagaatggaagaccatgaataagcacaggggaaggactcaataatcagttgtcatctggataaagaaaacaactttccaggcagaagaaacggcagctggaaccaagacacctggagcagccatggagcagcggtggaacccactggtcctgagcacatgcttcggcgtgaaaaggacctgtggccagctgtggccctgggcaagctgcttgaccttcctgagtctcgcctctgcgtctgcacagtcaggactggcacagcgctggcctcctgatgctgtgtgtggtgctgtttgcagagcacttgatagaatgcgggttcaaagcaaacccttcatctatgggccgaggaggaaacctggctcagtgcacaggccagcccaaggagagagatgaggcagggctggccagtggggatgcagtggccttcaacagcatgtcaaggcttctgccctggggacagcacagtgggaggagctgcccagcctcatgggctgaagtcagaagagccagaaataaacgctaccctcaaggcctagatggggacctgtccctgactctactgtctccgtctgttcttcccctgtgcacctatagaagagcctcaggccccctgggggactcaagctcagggagggggcctatgtggggagcaaatctgcagctgcttctctctgtggctcacatcccctaggagtgataagggagcaggccctgctctccggcctcagcctcagcctcagcctcagtgtccctcccctctgccggtaccagcccccgggtgtgagagaaagcagaggtctgaagaaatgggctcccagagggccccgcctcaaccccactggcccaaggccccctgcagctcctgggcctgagccaaggcaattccgtcagtgccagggtccccaggacacagccaggattgtgcagtccgcggcaggctcccagccacagctgaggggacaaggcccagctgttcctgcagacaagtgggcagctttcttcccacatgaaaagggaacctgtgtctctgggggagggacaggaggagggaagaggccaggggaggcccagggatgactgctcagggtcctgtacagcctggggtgggcaggtggggccaggaagagggaggcagccctggtcctaagcaagcctcccagccaccagctcaacccattctccacctctgacccctgtgtgaccctgggccagccccttccctaatctggcctcaggtttctccattgaaaaaaaagaggaggtgaagaatttccccttcgtcctagcagagggacagcttcaaggacgatgctgcctgtctccttgaatggctggactcgcagccaggcacggtggttcatgcctgtaatcccagcactttgggaggctaaggctggtggatcacctgaggccaggagttcgagaccagcctggccaacatggcgaaaccctgtctctataaaaatataaaaattagccaggcgtggtggtggacgcccgtattcccagctacccaggaggctgaagcagcagaatcgcttgaacccaggaggcagaggttgcagtgagccgagatcacgccattgcactccagcctgggtgacagagtgagactctgtctcaaaaataaataaataaataaataaataaataaataaataaataaataaaagtttggactccctaagtgaggagggtagcaggacatggtggaacaaggccagacagagccttcagaactccgtctgattggagggtagacccacgccccagcacgccctgcgcggcctaggaaacagtgtgtgtggccacccacagtgcgggtcccaagaccccgggaaggcatccaaggggaggcactggaggcggagttaggatcagctctgccccactagagcccaaatgcaccatcccaggacccccggggcccttctctgaaaactgacaggacagaaactatctggagagagtctcttttgaatgactcctcttccatgggccttatcgttaatcatacacctttctttggagatgagaaatccaggctgggcacggtggctcacaccagtaatcccagcactttgggaggccaaggcaagaggatagcttgagcccaggagtttgagaccagcctggacaacacagtgagatccctgtctctgcaaaaaattaaaaaattagccggatgtggtaggatgcacctgtagtcccagttactcaggatgctgaggcaggaggatcacctgagcccagcaaatcgaggctgtagtgagccgtgatcatgccactgcacctccagcctgggcgacagagcaagaccccaactcttaaaaatagaaattaaattaaaataaaaaatccacctatgtctgcaccaatctctaccacacaccccagggcagcccaaggcaggccctcttcccactgacttcaccccaggttccagcagaagctccctgcacaccaggccctccagggctcagctgcagaacacgtgggacccacaatcccaggaaggtgaagtctgggccctccaggaaggggcagatgacatgccaatagggttggtaggtgaggctgtttgcagatcattgagcccttctaggagagataggggatcatgtaaactgggtcttattaaatgtagcagcagctgctatttaatgagtgatttttaatgggagataaagacctggatagagactgccaggactctttctgtttcagaaaactgagctccaactggagtgtggaatgcaacaggaaggtagtaaggtccacggaattgaggaatgcagggtgcacctctctcccagcacggctgcatcgcgggagtcagctctcgggatctctgctccggcttgtccccaaatggtgcagagccggctctggccatcctcacagcccgccttgctggggacaaaggagtgccactttcctggtgactctggccaagctcaccatcatgatgcacgcaggtccagccgggacaccgtgcacccttgaccctattactgcagtcaggggccagagtgtcctgattggggaggcctgactcatggttccctgtctgaggttgtgggatgggcccagtgagacaggcgagcaggggcttacctccacacagaaagcccatgacctccctggcacacaggtgagccggcaggctggtccccgttccactctagggaagaatgagagcccagaaaattgtcactgcgccttccttcctgggagactgccttttgtcgtgttgatgaagaggtgtttgcgaggcctattcacgttgctggagagccatctttaggacaggtggtgtccatgccgcctcgggggacgtccctgctccagggtcaccccacagagctgttgatgcccccagcgccctccgacgtgatgaagagcctccaagagcagagcgggccaagcctcagacatgttgtaacagtacgtggaagtcattagcttccattttaatttaagaagcccaattttataaataagagcaaattttcccaggctattatttctaattacgcatttacatcaattcacattatgcggttgatgaaatgttaataccaaaggcaattttctgctgatgggtggcatggagaggagtttcttcacatcacaagtcaatatttttgggaataattatccagttgctcaccagagtctgcactgactaacctaatggctgtgtctacacagtccctaacttgaggcgctaagaggggaaatgctccaatggggagagaaggtggaggagaccaagatcacgctgaggggggaccctggacagctctgatgtggcctctcctggctggtgggacaggctcagaatcaactgcactgtggaccagcatcacgtcttttgattattttacaaaatggctctagaacttagactttcatgtgcaaggtgagaatggtgatagtaactttcttatagggtaagttaatatatgtatgccttcattcacttgttaatctaagaaacacttaattgcacacctcctctctgtcaggtacacagtaggtactcaataagtgatagtgcatggaatactatgcagccataaaaaagaatgaaattgtgtcctttgcagcaacgtggatgcagctggaggctatatcctaagggaattaacaccaaaacagaaaaccaaataccacatattctcacttacaagtgggaggtaaacaccaggtacacatggacatggagatgggatcaacagacactgggatctacaagagggtgggcagtgtgtgttgaaaaaccacctatcaggtactatgttcactgtttgggttaaggggtcatcagaagcccaaacctcagtatcactcaatatacccatgtgacaaacccgcatgtgtcccccaaatctgaaataaattttaaaagaataaaacaaatggaagtgatgactctgaggaggaggaggcacagacatcctggcagagtgagcccgtgggaacctcctgggtctgggtggcatctcagagttgaacggcaccacggcaacagaggcagagaaatcacagacatctgtctgcagatacagcccaagccctgaaggacacagtcagaaggatgtgtcgttcagtgcaggagagcccctccaactgctcacagagcctcttctatgaggaagcgcagtactaggtgtcagggcatgggagaggcaacaggggccgggacgaggctggaggctgaggcggtgaagagaaatagacagatctgagagctgtcccaaaggtaacagcccagatctcagcaataggccgcagagggtagggagggaaaggcatcagggatccctcatgttgggctatgtgggtgtcaggccaattaccaagacaaaaaacagaagcaactaccaggctcatagtagaccagcctcaagcccctgctgagagcctggcttgcgaaggaaaatcaccagcttcatatgaacactgtgaagttcccttgtgacatctccatggaagcccaccaagataaaggaccacctccatctggagctagagaagagggcacggcactgagctgtggggaacccctacactctggggtttgacaaaggcggccaccagaaaacttacaaggagacggagatgtgtggccagagtcactagaggaaagtaaagagatctggtcacagaaacccagagcttcagaaagcagagctcagcctaataagctagaaagtcaagatgaggactaacacgtgcacctcgaatttgagaacacgccagcactgaggcacctcagcaggagccaattccgggacagggtggcctggaagtccacgcagaagacacacttgtccaggaggcagggaggccttgctgtgcagggaaggaagatgggtggtggcccctgtaggcctgtgcaggaagacctgggaatggggcaagccctttgtcctctccagcctgggaccctcaagcccaggagtgaggagctaagtaggcagtggcagggacctcagggctggggctccagctacttcttcttgcgtcgagctcggtttcttgtctgtaaaaaggagaggaattctaggcacagcattggcatgagggtgaaaggagagcacagaacctgacttgcagaggtgcacagccctcccaggcagagcaacgcacaaacgcctccctgcagccagcaccacctgccagatgcttccctgtgaccagcaccatccgcgattattcctgggctcaaatgctccagtgccaggcacaggtgagagggtaacttagatacaggactgaaaaaaaggccaaattcaggggtaacatcctcacccaaacttgaaatagattaaaaactcaggtgagtttgcgaacccatggggaacatagctcacaggcacttcaagtctcacaagcatccccacagctggcatgagggtgcccaactctcccccgtcctctatcactgtccccacaggtatttttttgagacagggtctcactctgtcatccagatggaatgcagtggtgcaatcatagctcactacagcctccacctcccaggctcaagtgatcctcttgtctcagcttcctgagtagctgggaccacaggcacgcaccaccatacccagctaattttctgtattttttggtagagacagggtcttgccatgttgcccaaactggtctcaaccccctgggctcaagcaatctgcctaccttaacctcccaaagtgttgggattacaggtgtcagccactgcacttggcctgtcaccacaggttttaataaggctgagaggagagtgggcaaggacacacctcagaccctctggttggatgccacaccaaagtatcctgcccagggagccacagctggggctggacagaggaggcctagagccccatgcaggctgaacagaggtggcaagctgggccctcacatcagcctgcagacccagcagcgtttatttttgcagtagaaccaacatataacaattagattttacataaaaatctgggtttccagcttcatctgaaacactggggcagctggccacgcagggcttgctctccacagggcagccacaggccagagcccagcagctcccaccccaggaatgcgggagggcaatgtggctccaggccctgccaatccccagcatctcaggcccgccccccaacaccccattccatgtctgcctgtcccctgcaggcccctccacccatttccctgcttgtcctcctgccccttatggcctacaaatccacatgctgggccccaagcctctgagagctctcggacgccaccttccaggcagcaggggagggaaagaagccctggggctgcacgggcagggggtcccctcttctgcggctagggcaagtcctggggagcaggtctttctggccaccccaagcctgcctggcgtggaggggaagggtcaccatccactctgccctcaagagcagcccagcaagggaaggaggactgttctgagaaatgaggaagaaagggaagtcgggcccagaattgtgaccccaggagggaaagtgtgcccttagaagaaagcaggatggggcagggtgtggtggctcacacctgtaatcccagtaatttgggaggccgaggtgggtggatcacctgaggtcaagagtttgagaccagcctggccaacatggtgcaaccctgtcgctactaaaaatataaaaattagctgggtatggtggtgcatgcctgtaatcccaactactcaggaggctgagtaaggcaggagaatcgctcgaactcaggaggtggaggttgcagtgagccaagatcgtgccactgcatgcctgggcgacaaagtgagactccatctcaaaaaaaaagaaaaagaaaaaaagaaaagaaaagaaagcaggaggaggaggtgagaggaaggatgggaggtggagggaggaaaagagaaggagactgggaatgaggaggaaggagagtggggacgaggagaaatgagagggggaatgaggaggaaggagagtggggatgaggagaaaggagaggggggatgaggaggaagaagaggggaaataaggagaacagcggggatgaggagaaaggagggggatgaggaggaagaagagcgaggatgagttggaaggagagggaggatgaggaaggagagggggatgaggaggaaggaaaggaggatgaggaggaaggagggggtgatgaggagcaaagagagtgaggatgaggatgaaggagagggaggataaggaggaagaagatagggaatgaggaggaaggagagcaaggatgaggaggaaggaggggagaaaaggaggaaggaaagggggatgaagaggaagaagagggagggtgaggaggaaggagaaagaggatgaagaggaaggacagggagtatgagggcgaaggaggggggatgaggaggaagtagggaggatgagtaggacggaggaggtatgaggaagaaggagatggggatgagggggaaggaggggggatgcggaggaaggggggatgaaaaggaaggagaagggggatgaggaggaaggagaggaaggatgaggaggaaggagagggagtataaggaggaaggagagggaagatgaggaggaaggagagggggatgaggaggaaggtgagggagtataagaaggagagggaagatgaggaggaaggagagggggatgaggaggaaggagaacaaggatgaggaggaaggaggggggataaggaggaaggaaagaaggaatgaggaggaagaagaggggtgtaaggagaaagggggggatgaggaggaaggaggggggatcaggaggaagcagagggggatgaggaagaaggagaacaagaatgaggaggaaggaagggggatgaggaggaaggaaagaaggaatgaggaggaagaagaggggtataaggagaaaggagagaggggatgaggaggaaggaggggggatcaggaggaaggagacgggggataaagagggaggagaggggggatgaggaggcaggagacaggaaatgaggatgaaggagatgggggaggaggaggaaggagagagggatgaggaggaaggaaagggtaataagaagaaaggaagtcttggagaaggaggaaggagaggggggatgaggaggaaggagagagggatggtgaggaaggataggaagatgaagagaaaggacagaggggatgaggaagaaggagagggaggatgagaaggaaggagaggggcatgaggaggaagtagaggaaggatgaggaggaaggagaggggagatgagaaggaaggagaggggggatgaggagaaaggagaggggggataaggaggaaggaggggggatgaggaggaaggagagggggatgaggagaaaggagaggggggatgaggaggaaggagaggggggatgaggaggaaagagatagggatgaggaggaaggacaccagggatgagggggaaggagtgggggatgaggaggaaggagagggggatgagaagaaaggagacaggggatgaggaggaaggaaagggggaataggaggaagatgaacagggatgaggagaaaaaaggggagatgaggaggaaggagagcggagatgagaaggaagaagaagggggatgaggaggaagtagagggggcatgaggaggaagaaggggggatgaggaggaagaagagggggtataaggagaaaggaggggtggatgaggaggaagaagagggggatgaggaggaaggagggggatgaggaggataaggaggaaggagaggggtatgaggaggaaggagggggatgaggaggataaggaggaaggagaggggtatgaggaggaaggagagaggggatgaggaggaaggagacaggagatgaggaggaaggagagggggatgaggacgaaggaggggggatgaggaggaaggaggggggatgaggaggaaggaggggggatgaggaggaaggaggggggatgaggaggaaggaggggagatgaggaggaaggagaggggcgatgtgtaggaaggagatggggggatgaggaggaaagagaaggagggatgagaaagaaggaggggggattaggaggaaggagaggggcaatcaggaggaaggagacaggggatgaggaagaagggagggtatgaggaagaaggagagggggatgaggagaaaggagaggggtgatgaggaggaaggaaggagagatgagggggaaggagagggggatgaggaggaaggagaggggtgatgaggaggaagaagagggaggataaggaggaaggagaggtgtaatgagggggaaggagagggaagatgaggaggaaggagagggggatgaagaggaaggaaaggggggacgtggagaaaggagagaggggatgaggaagaaggaggagggatgaggaggaaggagaggggggatgaggaagaaggagagggggtatgaggaggaaggagatggggggatgagtagtaaggagatggggggatgagggggaaggaggggggatgagggggaaggaggggggatgaggaggaaggaggggggatgagggggaaggaggggggatgaggaggaaggaggggggatgagtaggaaggagatgggggatgagggggaaggaggggggatgaggaggaaggagatgggggattaggaggaaggagaggggggatcaggaggaaggagacaggggatgaggaagaaggagggggggatgaggaggaaggagaggtgtgatgaggaggaaggagagggaagatgaggaaggagaggaggatgaggaggaaggaaagggggatgaggaggaaggagaggggatgaggaaggagagggcagatgaagaggaaggaggggggatgagtaggaaggggaggggttatgaggaggaagagagggatgagtaggaaggagatggggggatgaggaggaaggagagggggaatcaggaggaaggagacagggtatgaggaagaaggagagggggacatgaggaagacagagagtgaggatgaggaggaaggagacggtctcttccaagagcaaggtctccactttcctgttgcctcacacggactgccggcctcttggctggaacacaccttgctgccttttccctacacacacacattctgtatacatacataccgcctgcacacactctgggcatgtcattatacacactgtgtcatctgctcacatcagctgtcactcctctatgccagcagacattatttgtgtgtgtgcacgcacacacacacacacaggggactccccatctgcacacacgctctctgtctgcacacaataggcatgccatccacacacgggtatactgtccgcatacaagtgtgtgcacacacatacacatcctctctgcatacctgctgtctgtgtcctgaggtcacacccctgggaccccagcacctagaagagttaggggacacatagccatgggaaagggtggtgcttgaggctgagacccaggggtggccaacctctgggtggccaacctctgggtccctccccaggcccagagacagggaggcaggtgtgggggaactatgcccctaccgaccctccaggcacactccaggtgtgggggaactctagcccctgccaaccctccaggtgcacttgccgctccctttctcatctctcaccaggcctcccccagctctgtcactcatcccctgcccctctgtcccctcagcctgctcaccctagtatctctctgcccatcccccagccaaaagggctctggaagccacggtgtagaccgatggcaccactgcaatcacacgggaccaacccttccacagcaaagaagtgagagctctgagcccagcaaggcctggtcctccatccaggtgtgccccccaccacccacctccaagccagcaccaggcctttcacacagcaggcactccctagagactcgccaagctggataaaacctctagataccacttgtctaaagtggcatgggaccagctcaaaacttgacaaagaatcttgcacccattatcccccctcaccggccccgggtcctggaaggagccggacagcgagtggcacttgctggtgagtacagagagcccagccggagagaggagggaaagggggattagggggcacaagccagtgtggcccggcgccggggctctccccagacagagaatctcaatcaatagggctttttatttttattttgaaatggaaaaatgacattttgcaacattaccgtgaaaaattaagctagatctgaagcatcacagatgttttgcaaataaaaccagggctttctgtggctggtgattgctgaatttaaacccgcaggtaccctggcccagccagcaggccccgggggagcagtctgtgtccacctgaccctgcgcttctggggaagcgtggtctgcctacagagcctagggggacagcagccacatgtacacgaggccaggcagccccagctccccaggcacggtgaccttttgccaacttcggaccggaacacaaatctaccatcactctatatcggctttgattggatcaaaatcccatcggaaaacagggggaaaggcaataaaacctccagaattgatattaaaccactgacatttcacaaaccgcgcagcgctggcagctgccagtctatcagcaggagggactcgaaggggacaagtcaggcatgaaggtcacggcagtaccacagagctccgcccaggccccacgtcagcaccaaggggagaaagggcctagatggccacagcccccccaggaccaccccatccctctgcacctggttggtccatttgccacatgtgctctctgcagtgggggaatgaactgacctctgaagccaaagatgatgtcaaatccggaggttgtgactgtcctcaaaccccagtactgtgcctactgcagtcccacagtgcagaggccaccacctaggatgagaccaggacagaccaaggttcctctgagagaacagcttgggcctgaggccccaccagaagatgtgaaatggcctcagcttcctgcagcccagcacccactgacccctgccatgtgccaggcaaggtgactaggcaggtacgaggatgaccagagcacagctcctgccctggaagggctcagagcatgcatctttttttccaggtaaccccacctgggcagaagctgggagtgggctgaaatgagaccctgccaggtcccagccccctccccgagcacaccgcctctcacatggacattgggcctcccagagcccatcaactctggcacagacttgcatgcgcatagagccagccctgtgctggccttcgagggacagtgcaagaagccgttagctccctccagtactcagggagacccagaaagccactctagaggtagcgaatcctgccacctcccccagcccccaagccctcagcagacatcgcaacatggtacactctcctgctaagcccaggtgcagcctcagactctgggagctggcctgagatgaaagcaggtctagggccttcctgaaataagagcttaaagccagacacgagggcagttcttcatgtagggacaaaaacaagggcagtccaacatgttaggaggaagcaagcaggaggaagtcttcctggaggaggagagactgcagctggccagagtctgccaggaaagctgtgtgaacaggcaggcaagcaggtgcagacctgagccaggctggcaaccacgagggttgtgaagtgggacggagtccacatcctgtgccctaccgtggagccccaggtggggccctagaccttcaggggccactcagcccaggacagtgttggtgggatggaggatcctctgcttcccccacccttcagagccaccccagggcacagaggcgagccaccaagagccaggaaactcctgtgtccacagtgtcaccagctggccccaggacccattctcagggatgctctggtcagaagcctctagatggtggcccaggaagatggagaagggatgccagaaccttgggggtttggatcagaagccacactttagtgtgactggcatttcccgagccactcgggatccagaaattcaggggacacagaaacatgaacattgacctgagtgcaccccatgacaatttgcaaagctacttcctgggcatcagctggtggacctcacagcagccctgggagcagggaaggaacccagtgccctctgagcagagggtccaaggctcggtgtggtggagagactcagcacagatccaacagtggcagtgtctgcatccaggctttgaccaccccttcactgcctccattgcaccgtgctccccgccctgtgttcctgcttccctgacgacatcagaccaaccctgcaggaggttggtcagtcacaggggaccaaggctggcaggacccagcactgggaagctgccacagatgccccaggcccccatagcatctccactggaaccattaaaaggcatcctgccagcaggtagccttctccatgggtctggagagcacaagggagccagggccctgaccctctggccgacccttggtcatgacgagctggctccatgatttctaatcaccagccttgccattaaggtgaaggaagcgcacggggaaatagcagattttatctccaacagatcgatctgctgagatccatctggccccagcctcttaattctccataatgtcaaagcaattttttgttaagtatacagtctgtcctctactaaattaaactaatagatctagtgggaaataaaaccccaagtgtattgagaatattaaaaataaaaaaaataaactcttcatgggtctataagatttatcttggcaaatgattaaataacacacacacacacacacacacacacacacaggggctgtaataaaatcaatttgggggtgctcagctccaccagtcacctccaagttctggccattcctctcctcttagtaacaccacccctcttaagcacctgggttcaaaagtggctgggctatgccctcaaataccccatgctacatcctcacatcaccaaagctagcaaggcgtatgcaccaacatgtggactgttgctgttagggccacaccccaggtgctgactgactggctctcaaaaccaatccccccattcacccactgcaggcagcaatgccagtacacccattttacagatgagaaaaacgaagctctgcaaggccaaggcaaagccaggatctgagccaacgtccatcagactccatagccctggaccccactctgcttcgttctgctttgctttgttttgctttttacttaattgtctatttggccatacacagcccaggccgtgaggcaggatcttgctttgatgacactcatcagagacagcgtctgggctttccctatagaacacagaggctggcacccaagggagggcagaggaaccaggaagggtggggcgaggcaggctggccctgggacttgggcacaggggcctgctctgaaacccacccaccttcactgcaccagatgcactgctgtttgctggggccagatctgcaggcaaagggggtggccagcagaggaaggtgggaggtgaggacacattaaatggtctctcctcagagccaggacccaataaggaggggtctgtggcaaccacgtggcttctgccctcagctcccagccaccgcccctctaggggatggcagtttcccagctcccactgccccctatgctgccatcagggtcagaactcctccttgtcaccaagtccaaagccttaccctgtcctgtcccccaatgccacttctgctgatcctgctttcttggagttttctctttgtcccagtgaagtccccagatctcctgcctgtacccccttgcataggcagctgcttgtctgggatgccgatgtaccctaaccccttcccacctagctcagccagattctactctgcacttaggcggaactcaggaagcctccccaggcaggacccactgctcacctcttcaggtggcccctgccagggctgggatcactatgtgcttagcttgattccccacgaggctctgagcctcatagccagggccacatcttgcttagctctgagccccgctcttctgggcacaggaatccttgatgtggctgcaaagccccagcttcccttgtcctgcctcctgtcccaccaagcccccctcgctcacaagccatgctctacccccatgtctcctcccatgggcttggcactcgtgtgtcctctgccaaaagcactcttccttccccaggtctgcctggctgacagccccagaccttcccccaccaccaaaattcccactacgtgcgggtgtgcaccgagcactgggtgaaatatcagacttagtttttgtttcttctctgggggtctgtctccacccgctcccgggtgcaaatccgaattccctgcaggcaggaagcctgtgtgtcttgcttatggcagcatcccctgcaccagcatatcatgagacacatgctagataaatgatcagtcttcgggacatgttggctggaaaaatgtctggggtgaaacaggccctgcctggagtttctcctgtggtgttcaccttctctagaccatccccaaacccaactgatcctgcctgtgacaaggaagcaaacagcccaaggctctgaagatgcagtgtgatggcaccgatgcagcaatgtcaggccagaccctggggcctggcagctgtgagtcctcttgctgctgctggccaacccctggctgaccacgagcaggcctgctttgccaagtgcgagcgcacacgggaaagggcaggctgcctccctgatggccctggtgacagcagggggccctctcttgtctccatgcaatgcagggactggcacctgctaccctcctcctggaactcagcactccaagttgctgaggacgtggggcaagcaagggccccaggaacccaaaatgtgagccgtttcacttgcccctccttccgtcttaggggcatcaatcactgcttccctctccagcagtacccagcagtccctgtcagggtccaggcagggccaggcctccacccctcgatgacctgatgtgtgcccttggaggggcgtcttcctgggaccggacttcaggccattatccctgacactggtggcgtgtgaatgactaaactggccaaaaataaaagcccccataaatctcctattttcctataagctgtcgggtacacagagtgtgctgggattattgatagaaaactttatggatgggctgcatcttaaaatcaaaatacattacccaaaatcaatgttgccgtacatggtacagggaggacaagaaaggtcatccgagacaagaatactgaaacccaactccaagaggacctgagcattaaaataaataaattttgaaagtgagttccaggaaaaacactcacttagggctgtaatttaagggtgctttcacaagaggctgggcagtctttttaaatagcgctttttaaagtgcctctgagagtccagtgaatccatccacaaaatggtattgacaagcaccccagctcacagccctataataacagctcatgataggtaatgagtgagagccccgaggctgggcacacagtagccaggccctggcagaagcaagccccccgggcacagccaactgggcagggcagccaacccatggccccatcaaccacattacaagaggatctgcctccaggtctctgtgcacagcgaccccacaggcattttatagctgtggatggagggaggggaaaaccgtgttagttcccattgatgattaatcaggactagaaacaaaatgatcatgaaatactctcaagtccatagcttcacataaccacgattcactgcaaacaggtcatctttgtaggagcccaagagataccacagtaggtagacctgaatggctgtgtccgcagagcttagtgtccctttgggagaagtgacacgcatgctcctccccagccaccttctttagagtctccaactgagagaccacatcccaccaggacttagtgagaaggaaatggctcccctgcagggagtggggagccaggcttggcagagactggcagggaaggaacccagtgccctctgactggcaggagctgcagtctggtcttagctcactaatcctccaactagccaaagggctaagtcgaagagacaaaatccctgccctgctcacagaaaacccacagcaaaagggaggcaaagtgctcctagcagggttccctgtccgaatatttgctaggctctaactatgggcaggcccagctgggagttaaagacacagagaaagccagtgtggtggctcactcctataatcccagtgctttgggaggcagaggcaggaggactgtttgaggccaggagtttgagaccagcctgcacaacacagcaagaccccatctctacaaaaaatattaaaaataaaacattagctgggtatggtggcgcatgcctgtagtcctagctacttagaaggctgagacaggaagatggcttgagcccaggggttcaagaccaacctgggcaacacagcaagacctcacctctacaaaaaattttaaacaaaattagccaggtatagtggtgcatggctgcagtcctagctacttggaaggctgaggcagaaggatcgcttgagcccaggcattcaagaccagcctgggcaacagcaagaccccatctctacaaaaaacattttaaaaattagctgggtatggtggcgcatgcctgtagtctcagctacttagaaggctgagacacgaagatggcttgagcccaggggttcaagaccaacctgggcaacagagcaagaactcacctctacaaaaattttaagcacaaaattagccaagtgtgatggtgcatgcctgtagtcctagctacttggaaggctgaggcagaaggatcgcttgagcccaggggttcaagaccagcctaggcaacatagcaacaccccatctctacaaaaaaaatatatatatattagcaaggcatggtgggctaatcctcctggtgtcagcatgataactctggaggctgaggtgcttgagctcaggacgttgaggtgcagtgagctaagatcgtgccactgcactccagcctggacaacagaaaaagaccgtgtcaaaaaaaaaaaaaaaaaaaaccatagtgaaggtgggtcagctgctctcatcacagtctacaaggcagggcagaaaacagatagaccaagctgaacagacaggaaagagactacaagtctagctcaggctgctccttgctcccatcagtcaagggtagggccttgctctccacaccaactcgaggcatcaggaccaggggctcacctggaggagggaagagcttagtgttttggttaagatccaggaccccagagtaagacaggctttgggttgatgcgtcactcagccacttactaactatgtgaccttgggcaagttccgtaagcttctgagcttcaaccataaaatggagtgaaatcaccatgtctacccctggagttgtgattgaggtaaaatgagctcattcattcattccacaagtatttactgagctcctactctgtgcccgaccctgttgtaggcgctagagatacatcagtgaacaaggcaggcacagtcttagagacctgcaacaagacactcaataaataaggatgtggtcccatgtgttggaagatggctggcgaaatggaaaaaataaaggaagcagagtgagggcctgggagtgctgggtggtgggaggagaggcagtgtagactgcagtgttaaatatggtggcccaggtgggcctcatggagaaggtgactgcttgacaaaaaccagagcacaacggagttagccaagcaagtatctgtgggagaagcatgtcaaccagatggtgcggctggtgcaagggccctggggtagaagcatgcccagtgtgctgcattgtaggaaggagaacagtgtggctaggggagtgtgagctatggagaagacagaaaagatgagaagatgaaggaaaagggtgagcaggaagcagaaaggcagatggtttgaccttggcagccactgcaaggccactggtgtttatgccaagtgaaatgggagccactgtggggtttttcagcagtggaagagggatctgatttccctgagaaggatctctttgtcatgttgagaactgatgcctagaaagtgtctagtacatggaaagcatgtgaaaacatgtatctgtcgctcttagagtaataccaactcatgcagtgggcaagaaacacccaaccccacaaggcggtacagggataaattacttccagataattccctctagctacagggattctcccacgggcatcgctggtctccagcattagcctctgcttggatctggcatcaggaaaggagactgctacctctccaggtgggccactgcgcagtgggctagctctttcttcagaaccctgcttggaatcagtccccaaatgagcctgctttcctggaaccccgctgtggtcctgaatctgcatagagcggtgcaagtctgccctctcccttcagaagctgaggacagcaatggggcctggcagggtcttacattcgggggtccaaagtggtttctaagggcacatgggatttcctaggaaaagctcctgccatgacagaaggagctggcaactgcctctgtggagcccctagagaggaacttgagggaaaggaggaaagtcctataggacccccttcttccctttgcccccagcaggagaccttagaaaacaagggcttgatagatgagccacagtgagccagggggtgggagtgactcctgggccatagacgaggaaactgaaaggcaggcactggaggcaagaagggctggccccgggcacccgctggcgaggacagccttggagagggcctgcagctcctcccctctgagctgtgctgcgctggccgcctggaccagggtggctgctggagagtgttttccctctgggtttccttctccttggctcccagggaatcctctggcggtgcctccgggaggctggtagccggggaagcaggcacgtgaatccaccgggctgccccaccccaacctgaggtcagagctgaggcgtaggggccggggtaggggcagaggtgccgaaacgcactagctggggactcccgggggaaggagataggagagacccaaggcgagccttaggactcgcccctatgactatgactacgcgctgcgtccgaaccacatgtccaccccgcatttgccttcggggaccagaccgcgctccctcagatggctggggagggagcagactccgggtgaaggctgggggaggtaccgggatgccgagtacgccagagcaggcgggggatgggttccggcttcctgccgcctcggcatctcgctttgcaccgggcaaagaaggggccacgaccggcgaagagcgcgtggagacacagggacccgcgatccaggggcaggaaccccgccccctcccggaaacctcccgggccctgagtcgtgcccggcgctccccaccccaccccacccccgccgcccctgccgtcactcacggccgctgcgggctggctagcgtgtgcgctctccgcgccgcaggcacctgctcgctgggcgctgtgcgctcacttctccctcgcgcactgcagactcccggcgctgccgccgccacccagcgtagtctccggctgggcacagcgttccgcccttctcgcggccccgggcgcccacccatccgtcatggcccaggcctgggccaaacagcggggcagctggttgcccaaactggggtaaggagttgagggctgggagctgcagagaggaccgagggacacacggggagcagggatgagcggccgtctcgagccgtgcagactgggaagaagccagggagagtttgggtgggaggactcccaacccaagcgggtgcggggcggggctgtactccaaccagaaagacggtggtccctccgagcgacccccgaggagagagggggagcgctctggggcgggggcggggcgggctgtggcaggagaggggagggcgggggcgatgcagcggtggaggcggcttggcgcccagccactgaccgccccctcccttcccctcccctccccctctccccgcctctctccggctccgggtccgccacgccggacccgctctccccgcgctgcgctgggtcggacgccaggtctgcgcgccgcggctgagcgcccactcgccctgcggaaagagccgcggaggaaccggcgggggcggctgcgggagccgaaggaggtggcaatcgggagcagaaccagaaggagacagggaggcagaagctcgcggctccgtggcacgcactccctcggccagggatgggtcccggcgcggcccagcccctgcccggcccgccgggcagagactgaaccgcggatccccaccgtcctgtggacgaccggacagagagaggcactgaccgatcgccagcagcctcccggtgggaccgcgtctcctgcacaccccgcgcagcgccccccgccggagccgcaccgggcaagccggcgagggagcggggctgattggcggccgccggcggccaggggagggggcgccgcgcggggccatggcaggctcggaggcgtcctagcccgagccggagccgatccgagcccacgcggccgccgcctctccgctcccgggcccccgccgccaccgcgccccccgcgggagatggaacagcggaaccggctcggtgccctcggatacctgccgcctctgctgctgcatgccctgctgctcttcgtggccgacggtgagcgcgggaactttgctgccgctgtggactcgggggggtctttgctggggccgccaccgagaagaagaagaaagagaacgaaccgggaagcttcgcggtctccagcaatcccgctgtgcagcctgggcccggaggggtagggagaggcgagcggcgaagggtcgccgcagcagcagcgccgcgcccgagtcgttcccagtcccgccggggccccggctgcggaaaggatgcctgcggggagcgggagtaggcgcgccccagccaggctctggcggtgcggccaggggcgggggagaagcacgagtcgcccctgccgccccgccccatccggagggaagcagtaggcagccgatggccggtccctgcctcggccctgcagccgcttccccgaactttgctagcccctccggccgtgcgccagggagcagctgcggggtggggggcacaaggccagccagccagagaccgactgcctcgctttaggttgccccaggcccccgacctacagctggtcacgcctctctctctctccccacccccagctgcattcacagaagtccccaaagatgtgacagtacgggagggagacgacatcgaaatgccctgcgcgttccgggccagcggagccacctcgtattcgctggagattcagtggtggtacctcaaggagccaccccgggagctgctgcacgagctggcgctcagcgtgccgggcgcccggagcaaggtaacccgccgcccacgcggtaccggcgcgcgcccggctcgcgcccggggcggcgaaggctaacccagggagggaagcagcgggcttcactcgcgcagggcgccgccctgtggcgcagcccatcttccaccttcgcatcccaaagcatcttcaaagtcagcagtggttacccccaaacctgtcaattattttgacagcatcgctgttcccaccacctcccagaactccattcacgcccagcccctaaagagccacacctcagcctggtcgcttgctcgtgctcgctggctgcggccctctgatgggtgctgggtagtgaaggaagcccccttggtcccatcaggctctccccgccctctgccactttgaggaccccagggctcccacggctgcgttccagaggccaccagaaaaccgagtaccggaaagccggcaggacctccagccctcaggggcacagaggggccacttctctgtggccgaaaacaggcccacgctgcctgtctgcctcaaaacccacactctcttacacactctagtgtgctcgcgtgcacacacacctacacacacacctacacctacacacacctacattctcccagggtcccacccagagttactcccactgagcctcccgctgggtgctgtccagacacagcggccctccctccagttcttcacggctcccagtgagctgggggaggattttgagccacgcggcagggcctaaggatgcccagagggaaggagaggggctttccttcccaccctggtgtccatccagtctccccagttcagccggcaggtgtgcaccagggcagccacccgttggtcaggcaccatgctagctccaaagcccgcttcctcctgggaaactcttggaaagccggacgtcctttgtgccctcaacccccatcccccgggcggtttcggtcctagcctgccggaggagggtgcccttgcctaaaggcggatccgagttcccctagccagaaggccgcgagcctcacgtctctctctccctctttgcattttaggtaacaaataaggatgcaactaaaatcagcgtaagtgtggagcccagcgcgggccgcgggagaccccttctggccgcctcgggtcccgcagctccctcccttagcaagccgcggcggccgcgcatgtggggccgcgcaagtagggcagcgatcgcagccttgcatcggtggctgctcggcgtgtccgggcgccatctgtcgccggttgcagggtcgggttctcttttgtgtaaatcaagggtccaaggcttgagtcccctaattcggctcggcgctgacctgtaaaactccccttggtcggactgcgcgcttagggcctctcgcgcctgccagcctccgctctgcgggcattcctcctagcaccgggagcgcgcggctgctcgccctcgccgcgaccgtggcgccagcttcccgccccctctgccccgccctgagcatctgctctgcgccctccgctgcaaccctttatcctccgcctggattgcgggtctgggtgcggggtgttgcaggcttgcaggggacggggtagggggtggttgtgccaggctgcgaggggcccgggtcatggggttgctaactctgggaggagatgcgcccaagcttcccacctggagcgtagaaaggcctggagatgacgaagcctcctcgtgggctcggttcagaggtgagggctccctgggtgtttgttgagagccgtagagcagtacttcccgaagtccccaccggggcgcaggggaggagcacttcgctggggggcttctggagatcccgcggaaaggcgggttggtagcaggtggccagggagccaggcagcagcctcagcgttgcttgccttcttaagaaagcacagtgttagctgtaaagggcggggtccggtgacagggtggctttccttaggaagcgattcgggcaggccctccgtgctccgggaggtgaggagggccggctggggcgggactgtcggttggagcgcgtcggggcgggaaagacgtggggaagttaaggaacaaggaatccagcctggggtttcctgaaggtgcaggagggaggaaggagaggtggactctgcccttctgaagcgccagctacgggaagacaagcagtgttggtttgtatgggcggggcagatgcaaggtgggcgtttggttaacgtgatggggacgtggggacacagtccaaagagctggctgcctggcgtccacgcagagttggaagccctatgccactgggtagacgcgggtgaaagggaagccggatcgtgatggtgggcaaaccaggatccgggaagtgttggggtgcgcggatgagggggcgcgacggccagggtggccagaagagtaggtttgggagctgcccagcccggcctctaaccctgctctcttgcagaccgtacgcgtccagggcaatgacatctcacaccggcttcggctgtctgccgtgcggctgcaggacgagggcgtgtacgagtgccgcgtgtcggactacagcgacgacgacacgcaggagcacaaggcccaggcgatgctgcgcgtgctctcgcgcttcgcgccgcccaacatgcaggccgccgaggccgtgtcccacatccagagcagcggcccgcgtcgccacggcccagccagcgccgccaacgccaacaacgcgggcgccgcgagccgtaccacctccgagcccggccgcggcgacaagagcccgccgcccgggagccctcccgccgccatcgatcccgcagtccccgaggccgcggcagcctcggcggcccacacgcccaccaccacagtcgcggcagctgctgctgcctcgtcagcgtcgccgccatcgggacaggcggtcctgctgcgccagaggcacggctcgggtaagggatcgcggagagggggcgcacgcgcggggatggcgcagggctagggctgcgccgggacgccccggggggctccggacccaggacccgccccctgggcgcatttgcatatgcatactccttcctagttaggtcgggagcgccccccccagggccttcttcccgcggtttctctgtctttactcctggcctctggaagcatttctgatgtgcatttatgaatggaggagggggctgccctgccagctacctcagggtacgctggaggctgtagtgtggggaggcgacctcttttgggtttggagaactggaccctgagggctgagctccgatggtggcaaggggccagtactcagccaccaccggtggtggaaatgagctatccccagatgggggcactggcacctgctggagagcgggaggcggttaaaacttgagttgcgttggtttctattttgtgtgctcgattgaacagactttgtccaagggtgtggaggggcctggctgtgtaacctacgccctctttggctaaatgcaggatggccctaggcagcagctctgcactctgctgtaaatcgcagatcctctccctttggctttggggtgggggcagtaaggactgagccctaagccactgttaggaaggcacccagaggggaaggcttgctttcttagggagctgagaggctgggagaagggattggggatggggggcgggatgtgagaaggcagaaggaggagaaaatgatggcttgactaccccctggtaggcagctctggggcggtaggagccattggcagaggcaggggtgggggcggtggggggcggttatggagggtagaaaggcttgcccagtgtgcccctcctcccaaggcatcccccactctctccccctgctccaagctgggcctcagagcccaccccagtgcctgactgtgagcaggttgctccctcccttggcccctctcctcagtcttgtttgatgcagagtcccacagggagcatctctcctggccacatggccctgggagcctggctttgggtacaggtgcatgtgaaacttcctagatgtgatggagcacattgtcacacccctacagtggtagttctcaaagggtggtcttcctgcaggctcctggactacctgcagaatccgctggggcaggtcttcatgtccttagtgtcaccatctcatcctgcctccctggctaactctcaagccctccgacagttgagcctgcagtctgcctggcacatcagttcagttctgtctctcatttagctctacccactgtagcagccgcctcagtgcgtctcaggctattggcttgatccgaaggcctcatccgtcttggatgccacacaggagcccacaagactgtccctcaggctactggggaaggtagggacctgcaaagagcctccacagcccagctgggaactttccaccctctgcactaagatatcactaggtgctgtgacaaataaaccccaaaaggccagtggcttgacacaattcaaatttaatattcctcgttcatatcaagtcctgccctggagtgccccagggcatgtggcggctctgttccatgcagtcatccagggacccaggctgagagtaccagcctcagcaggaggcttccaaagtcactctgggcatgacatagagccagcagaccagtgaggagagacagaagcagcccttgtcagctcactgccctaagagaattaagccctaatactctcaggcatgcattgtgtatgatgaatcaacttgtttcatatgcatttaggacggccctaagtatgtatcattcttgggagactgagaaaacagccactcaaatctttctggcagcgcttaactctctcagagaaaagctggtttagaaaaatggcaaggcgttttttaagggctaggtctagaagtggtaaatattacttctaccctcttccatcggccagaactcagtcacatggtccaacatggatgtagggcccgctgggaaatgtagtccttggtgtggcggctgctttcgggcctcatctcttcacagtgcaaggggagcgtgactcttcgaggagttagccatctctgttcagcatacaggcagtgctcagggagagttcctattgacttacagagccattggcttaactgatgcttgttggtgaagagaacatccttcttccccctccccttgggccccagcaaggaaatgtgtgcattacaggctgggacgtacctctaggatattcctggaggatttgaaaggcagaagttccgatgtaggttgtgcttccaccacttactggctgtgtgattttaggcaagtgacttaccatctctgagtcatctgtaaaatgaacaggataatctctctgacctcagagggagcttggtatggaaattgctgcacatatatgttcattattatcaccctggtcattagctgcactagctggagaggagaggatgggcagataaagctaaaaggttggcagttggaagccaggctatggagggccttgaatgccaagtggaaccagcagttggttaaagaccggtcaagaccatgtgaaatagatctttgagagtggacttggttgtgctcacaaaatgataatgagaccaaggtcatgagcgcactcctgcttgaatctccctcttcccttggccttcagcctgagtcccaggcccagccacagatgacctgactgcctgccatagccagtctgatctccagtctcggtgctggccatggaggctgaatgagagagtgaagatgctccaggacatctcatccagggaaggtgggccagtcagtgcccttcttcccagaagatatggaggtcctcaggtcaactcaatgctgatggcacagtgcccagtgccatcccagcagataggaccttgggcacccaccagccacggggccatatgttaatgcccatgtgggtcactctgccttccctggaggggctgatgtccactgccatctagaaagcacagcttgcctggatcccagcggggctgacagcagcacccctgggatagaagtacagtggcctctgaggtctctgtcaccccctaacccttgccagctcctgaactggccaggaactgtgtagacacatctcagaaagaacctccagtctctctccaagtctcctttggggtgcccagaaggtgggccttcagctgggaggtcagaaaacctgtgtccctcactctccaggtgaagctctcttgagagtggttctgctccaggcactctatgtcccactctgggcacggaaaatggatggcagacctgtcattcacaaacacatccgaacagccttgatgccaaggagggaaccatgctcagtcttgtgtcccacctcaccccggtcacccaaggccacccaggctgtgtgctgtcaatgtgaagcctgcagactgtgttttggaggatgggcattagtaacctttctgtagggctgcatcaccagccagtgccccgagctcagctgctggcaccaggtactgctgagcgccctgagaggcagcaagccagctgctttgctcggaaccacagcagcctgagctgcagagggagctcggggcagacgaccttgggccttgcctcccagccactcaattctaggcagcttgatggggaggggtccagaaaggaccgctgcctcttggttaatagtcaagagtgtttgcagaggatatcaaccagggtgctggcagaggcacatggaacattcaaacagggtcactgggggggatggaaagagcgtatgtaccaaggtgtggacagggttagggcagccaacaaaggattgatgcaggtccccggggctggcatcagtgggagccatcagcagacctagcctaaaggtctgggggcagctggtagcacccagagagtaggaggggaggcacacagccaacccacagtcacccagcaaggatctcactcctcctgccctccattccctgtctgggcctccctttggccaaaccctcctggaacctgaaggcaggggcacccaggtggtgcaggctgtagaggtcagccctcaggggctcacagcagagtggagaagggtgggctgaggacctgggggcactgaagaggctcatggccaggcacagtggctcacgcctgtaatcacagcactttggaaggccgaggcgggtggatcacctgaggacggaagtttgagaccagcctggccaacatgatgagatcctgtctctactaaaaacacaaaaaattagctgggtgtggtggcaggcacctgtaatcccagatacttgggaggctgaggcaggataataacttgaacctgggaggcggagtttgaagtgagccgagatcgcgccattgcactccagcgtgggcaacaagactgaaactctgtctcaaaaaaaaaaaaagaaagaaagaaagaaaagaaaagaaagaggctcaggacactggccatttcagattggcaacagcaggggcggtcccagtacatctccccaaatagtcccccattaagcgatcgttcctggaaggaagtcagaaaaaaagtccctattttttaagtgagccactttggtaatgccacgaaggagagaggggggacttcctccagccctcatccattagctaccgcacagccaggcaagaaagcccttcccatgccacatgtgtacctaatacacccaaatacatatttgcactaaaagttgatgtgcaaaaactcattcatttcacgtctcatttgtcaagagacattttggtatttgtgcttaaaaataaacatggactgcattagcagagcagagcaggcgcaggaggctgggccccgtcttagctgtgttcataaatctggctcctaattaatctgaatgctgacccatttttcgtgaacactttgttgctggttgccatttctagaaaagagagagagagaccaagcagagtatcttccagactaacacttctaaatggaaaaggcaccgcagtaaagtctagcgcggcctcaaaagaatccagtttgcaactgaatggctggtgtgttggccagaggttcccctctgcagggacgttgggatcagagcagtggcgtgtgaacctctaattagcctcagggctctggctccaaggaaaggcaccatggcccccacagagagccggctggatgtggcaagctgctgctgggtgcccacacggagaactggctctcaatatttcaattaataatgagagaaagacagccaaggccatgggtatgatggctgtagagaggctgtggctgctgggagccgtcaaaggggagcatccgcggatgtcgccatggcaaccgtaaaccgtgaccaaagggggccgtgggcaaggtggagacagtcactacatctcgacccatgccccggtggtgatagagctgaaggaatggcacacacgtgacccaggagaatcgcgatgcagcagagtcaccagcagtaccagcaggcccaggacctgtgggccctgagcaagccattgaggcagccacctggttttcccatctccccggacccacgaggacccaaaggccctcaccttaaatgaacaatccactcttcccccaagttccgatgtgacatgagaattataattaagaagaaaacaaatctggcaagggatgtcccagagaagagagggcgaggctctctgagcatcctgaaaaagaaaattaaaggatttcataaaggaaatggctgagcctcacagctggcaagcaatgcctgcttcatccctaacagcagcaatcttacgccattatcagcgacatggcatcctctcccccagcagccagtcactgggagccttctgggcccagccccacgcttgccataagggggaaccagagatggcagtgtggacccaaacttaaaggagccagggcacccaggtaattccaggacaaagcagtctgtgctgtgccagcactaatccagctgaggcaatcaggagaggcttcctgtaggtggtgtgtgacttacagcttgaaagaagcacctgaggctgaagtcctcccaattaggtcagaccttggaaagctttcagatgccccctctctccttcccaaggttggagaagtccacaccaaatggaatggcctttgtgtatcagtcagctcactgggcaaccatcctctcagcatcagcaagaccctaaattcaggataaaaacagctgctcttggattataataatgataaataataacatttgccttttactgagcacttactgtgtgccacgctctcctctcaccggctttcctccttcccacagttctccctaatgcctcctgcttcagtccgtcccccagaagacagagcgctctctctgtgcttatagccagagcccacactctctgcccagctggagtggtagcccccaagaaaagagctggaagccagccttgttaaatgtcaccgggaactaaccccccaacaaggagctgctcattaaacacgccaggtgcatatccttaaagctctgaatattaaggattccccaagcatccgtggggataaatgaggtcaagtgcttttgtaatatgatattgattagttctgctctgtgtggacagagcaaggccttggctgtggtctaaacccctgagctttctggaagatgccagcatggttttaagacatttttgcagcacaggagaaaaataaaagcattatcttttttattcccccatgcttagctgactatcaccaggcatctcttgtaaacttgtatccagagtggtgagaaggcttcactttgccttacataagggctgcagggaagtttgagatgggaagtcagcaggctcagcccctgtaactcttgattcctgactattcctgatgaagaatgacacacctccttccctggggtcgtgcttctagggaaattagcctgcttgtcagtggctttggtgctctcagggaagatgtgctataaataccaagatggaggatccagtctggcctcctgtgggttagggtgtagctgctgttaaacagccagcggtggaggtggctgcgggggctgcttgcagacagcagcaccctcggtgaccgcaaagtatgagcatagcccaggccccttctcctgcctgcatcctccacaggacggcccttgagagacagaccttgtgcaaagcctgtccctgccagcaatcctgtttctggaagttattggttgttctgttctgtcgttactgctctctgggctaaaatatcaaagctactttggacaggcttcagttggctctggttcttgcagttcaagaggaacgttgaggggtcctggcgttggcatgaaataaggagccaaagtggacatttcggaagcttttccccacaaccacccgcccccacacccacctactctcccgcacccacctactctcccgcacccacctactctcccgcacccatgggccctgctccatgcagctcagaagtaaccagcttgccagaagggccactgagagggacagagcaccccctaaaagtcccagttgagcacccaatgcccgctagagaccgaggccaggaaaattacctaggcagatcagtcctccccacagctgcccatgctggtgggagaaccaaagcatcacccgagggacactgaacatagttccggaggaagttacactcaccaccacttccaaccatcgcattctctcctgacatttcaaatgttcctcactgttcagcatgctggctcacaggtaagccaggatttcaatgccaacaaatttgccccctttctgggcctttacagggctctggccctgcaaaagtcacagcatgtgcttctcactcctgcccttcataccctaagtattatgcttgttttccggatacatccaaccatttgattggaatcttgagtccatcacttcccactctctctgtacgagttccgtcatctgttatcatcagcacgacaccgattcctatgccagagagtggttggcaggatccggggggataatccgtggaaagatgttagcttaacacagggcctggcacctagaatacactcagtggatgttggctttggtaaccagcgttattcacgggaatggtgttaaccatccaggatcgcttactaagctggacagggtgctccgatctgagacttccttcatgagaccgccctccctcctgcaaatgctgtgagcatgatggagctaattgtgattgtattcatccattttgcattgctatcagggaatacctgagtctggtcatttatagagaaaagaggtttatttggctcacagttctgcaggctgtgcaagcaaggcaccagcatctacttggcttctggtgaggcttcaaggagctttaactcaaggcaggggagtagacatgtcacatggtgagagaggaagcaagagagagagggaggatgtgccaggctctttaaacaaccagctgtcatgtgaagtaacagagtaggaactcacccattacctcattaccatgaggagggcaccaggccattcgtgggggatccactcccatgacccagttacctcccaccgggacccacctccaacactggggatcacatttcaacataaggttggaggggatgaacatccaaaccatctcagtgatggggctgatggagctcagaaacagaaagggccatcagattgcaaatggctcggagagttgctgtttttgtaagttctctggctgcaccatttcaaggggggaaggtagaaagatggggatggtgccacatccccatactagtctggttggggctgtttgccataagtcacgagctccttggtgaacaaggacagcttcatcatggtttcgtgtggtccatcagcaaattaaacccccaggtttgcccacgtgccgagtcctggctgtgctaacagggctcctggggaaagctgctccatgtcatgcctggtcgtgcttctttgtcatataggctgctgccagtggcgcgggcactgtgatgtgagggggtagggcctttcgggtggcaaggagaagctcagaggagaggctggtgtttgcagcactggacagctgtgtctccaggggagaagtggggagaaggtagaaagctctctcaccatgtcatatagccagagagcctcctggggtaggtctagactgagaggaggtgcccgaagtccccatcactggggcctttacagagatagagtgagagagagagtgagagccacctatgtcagggagtgccccacagggatgggccttttggggactcacgccaccgttacaggctcaggacatgtgctggttcttccacttgcgttcctgcattttgcttttcatgttcgcatccaccccagcttccctttccgtggctcactgtgcccagagattgctaataaaggtgccacttggcaccgaggctagtgagaagaatgcaggacagagataccacctctgggatgtgctgggagtgtaagcaggctgccggccaggccaggaagccagggcccctcctgcctgtctccacccctcacgcccatgtgagcctgcctccctcccagcacagacagcccactgcagactcctgctggaggcccacccacctgtaatcgtatagctctagagacagagagccttccctctgctgaccctggcctgctgtccatcagctgccctcagggaggaaggcatggttttctttaaggcaggaaagcccagctgcaatgtcagtccccttagagtgacttttattacaattgattctcatacaaatgccgcttggcccagaggaaagatctttaataaacccatggaagggggagctgacatcacatcaggctcagtccgagtggggggtggggattcctggtctgctgtatctggtctggcccaggccaaggggcagggagctacccagagcatcaggcagacctagcccctgccccaggtaggagctcatggtctagttatggtggccatgcaggaggatgaacccagggctcagctcaggcacaagaggggctcagaaatggtgggctaccaggatggactagtagttgggaagaactcagaaaggtggggccagggtgggctggtagttgggagaagacttcctgatcctgcagccaaaggagtttctttcattctgagcacctagatgtgccttgctgctgcctcagggctcccagcagttctttccctgtcctgcagtcaacacctggctgagtgccccatccagactgatgcccacagacagcaggcctggttcattctcactgctgtttccccactgtcctatattcattggacttggtactagttcattcattcattcaatcattcatccagcaaatgtccatggagcatttttttatgtgcaggaacttttctagtcactgagggcataatgtgattaagactaatgaggtcctgagaaagtgacagaggaagagacagatattgatcaaatagtcacatagcaagtggaaattagcagccatggctggtactctaaaggagaggcccatgggctatgggagctaaaatagggagatttgacccagtcagggaagggtcaccaagaaagtgacatttgagccataatcaggaagacagttaagagttggccaggtaaagaaagaaggtagagctttccaggaagagggactcacatgtgcaaaggtcctgcggcaagagggatctggggaaatgcaaaggcctcacagaagcttactgtggtgggtgcagagaaagcaagatggggaagcaaaggggaaattaagtcaaggttagagtttactggtcaaacagggtcaaactgtaaggccttttgaagagatcaggaagctttgactttatcctaagagcagtgggatggggtttgagtggctagggcatgatgccttcagaaatggtcactctggttgcaatgtggagattggagaggtgggatgaatttgatagatggggaagaccacttaggaggcagtgatccagtcaagagatgatggggcttggaatcattggatggatgggttgatggatgtctgaatggggtgataaaaacaagtagctggtgggtgagtgaagggaaggatgtgtgaatggatgggggatgaatgggaggaagaatgaatagatgggtggatgatggaagaatgaatggatggggagaaggaagaatgagtggatgagtggatgaattggagaattaatagatgggtggaaggaaggatgaatggatgggataatgaatggatggaataataaatggatgggataataaatggatgggtggacagaaaatgagtggatgggtagatgggtacatagaagggagaataaatgggtgggtagaaggatgataagttgatgggtagttgggtggatgggtagaaggaaggatgagtgaataggtagatgggtggatggtgggagaattattggatgggtggaaggaaggataaatgaatgggtgaatgagtgggagaatgaatggatgggtagaaggagaatgagtggatgggtagatgggtgggcagatgggagaatgaatgaatggatacaaggatgacgagtggacgggtagatgggtgggtggatgggagaatgaatggatggattcaaggatgatgagtggatgggtagatgggttgatggatgggagaatgaatgggtaggtagaaggatggtgagtagatggtagatgggtgagtggatgggagaacgaatggatgggtagaaggatgatgagtagatggtagatgggtgaatggatgggagaatgaatgggtgggcagaaggattataaatagatgggtagatgggtggatggactggagaatgagtggatgggtagaagaatgataagtagatgggtagatgggtgaatggatgggagaatgaatgcatagatacaaggatgatgagtggatgggtagatgggtggattgatgagagaatgaataggtgggtaagaagaaggatgaattaatgtgtgagtgggtggatggatgggagaacgaatgggtgggtaagaagaagggtgaatcaatgtgtgaatgggtggatggatgggagaatgaatggatggatagaagaatgatgcgtagatgggtagatgggttgatggttgggagaatgaatgggtgagtagaaggaagatgagtggatgggtagataggtagatggatgggagaatgaatgggtgggtggagggatgatgagtggatggatagatgggtgaatggatgggagaatgaatggatggatggatggattgatggatgagtagattgggaatgagtggaaaaataaatagctgacgcataggtggaaagaagatataagtgggtggatgggtgaatggagagtagaaagtaggagaaatgggtaagtaggtaaaacatggatggaaagatgggtagatttgggatacaagttgaggcttgcaggatgggtgggattgggattgcaggcatgcctaaggttggagtttccagcaactgaatactgcacactcatgtcttccaggaaggaggccataggaaaaaagtctccaagtggtggtaggtcccagaattccatgccattccatgcttctgcctgcagtccctaggccactgaacctagacagaggggaagggcagagtgagtggacacagccaatcccagcctgcttccgactcccctaatccctcagcctttagggacaggagcagcggacctcctccctctgctgggcactgggtactctggtggatgcagcctggcccagatttgctgattcttgtccacgtacaaattaatgtagatatgttttttcaggcatttaagaaatcccatctccaggtgggcagataaataactctatttacattaaagactaatgtaacaaaaatacaccaggcaataattcataatgcattctattctacagagtcatattttaatgtgtgacatatcccaggcagctcctctgtgctaatttcatttaatgagcacatgttatagaattttcagagcactatccctgggcaattaaaatatgttaaccttttggttaaattgtgtttctaaagaaaagtcctcactgtgaaacagaaagaaatatccaggtgtcactgaggtggaacccaaaggcggattgtaatgggaaaggactgctgttaggtcctgcatgtgctggctggagggacctacagcctcctcccggacctcaggccatgctgcaccatccctgcccttgcatggccaggcccatttccactgtgcaggacaaggagctgaagcctggacccatacagtgagcagccttccttgagcagtcattaattgactacccactatttgcctgacccaggagatccaaggtacaccctggctccaaggttgggaagattgtagcatggaggtgaggtacccccagacaactggggtttaaatagggctagtataggagacttcaaggaggggcaggctcctctctttcaaaatatggacaggtcccccagctctgccatctacataatgggcacaccagtgctccagcattcccaagtcccagagtttcagatctggaaggggctcttagagagcctagtgtgagtgattcccaaactgtgctccttagaaccccaggagccccaccccaacttcaaccagagccattctgcttctaatggttttacatattggggttccatgaagccattagttgaaaatagggttctactgctttaaaagatttaaaagcagtttatatagttctcctgtgtgtatatatatacctatatatatatatatgcacattatattaaatatatatttatgcactttatattaaatatacaaatagttttcatatatatgctgccttctaagggaagaatttgaagtggcttataaaactgaatgtgcggccgggcgcggtggctcacgcctgtaatcccagcattttgggaggccgaggcaggcggatcacgaggtcaggagatcgagaccatcctggctaacacggtgaaaccccgtctctactgaaaatataaaaaattagccgggcttggtggcgggcacctgtaatcccagctacttgggaggctgaggcaggagaatggcgtgaacccgggaggcggagcttgcagtgagcagagatcgcgccactgcactccagcctgggcgaaagagcgagactctgtctcaaaaaaaaaaaaaaaaaaaaaaaaaaaaaaactgaatgtgccataatagaatgaaaagtttttaatgagcaaattggaataaaaggaaaatgaaggtgaatttgtgaaatcatcttgagaaaaagttagacaaagacatgtgtactggcagtgttgggaagctggaaggtgaggtcaaggtcactcttgcagccctgggctccccagagggaactcgagacaggcctctcagccccagcttgtatctgaaggttaaaaatgcgaggccacctttgaaggacctggcccatgtctggtgcattatggatggttagaccagctgggatgtctaagaaagactttcattcatgcattcaacaaacattttgtgagcctgtcagggttccggcaccgtgctgggtaatgaggacatatgcagctgagacagccatggtctccactctctcaggcacacccgctagcagagaagacaggggtcagacagtaacacactacggccatccacatacagccccgaagaaatggaacttgccttggagcctgtaggacaaagggagcctccagactgggtcagcgagggcccaatgtctgaaggagacccatggtctgaggaggacggaaatgagtgaatgggaggtctccgggggtcggcagggtggattcatgatggcactgggaggcaggcaggggtgcggggagagaggtagccaggcgagaagagttaggtcttcagcctgagacagagactcctgggaacttggggagcaggaggaaattgtgctttgcatgtgaaaagagtactctgggtcgggcacggtggctcacacctgcaatcccagcactttgggaggccgaggcggttagatcacctgaggtcaggagtttgagaccagcctggccaacatggtgaaaccccatctctactaaaaatacaaaaattagctgggcgtgctggcacatgcctgtaaccccagctactcaggaggctgaggcaggagaatgacttgaacctgggaggtggaggttgcagtgagccaaaatcatgccattgcacgccagcctgggcgacaagagtgaaactccatctcaaaaaaagagaagaaaagagcactctgtttctgcaaaggacatggtttggttcttttttatggctgcatagtattccatggtatgtatgcatcacattttctttatccagcccaccgttgatgggcatctgggttggttccatgtgtttgctgttgtgagtcatgagtgctatgatgaacatacaggtgcaggtgtctttttggtagaaccaacctgcacatgtaccccctgattctaaaataaaagttgaaaaaagaaagaaaagaaaagaaaagaaaaacggcactctgggcagccacgttagagtgctgggctatcagtgactggcttgcgggggcttggtggatgcagggaggccagtcaggagctgctgcccccgcccaggtgagagctgatgcagtgagggggagggttggagtgccagggcagggtgggtgtggggtaatggcaggggcaggaagtagatagattcagagctgtattggagtcaacttgtgggggcctctgagatgggccagagaagatgggtgagcttgaaagagccagagaggaacaggaaaggaatctagcaaagggaacagactgagcaaaggcctgaattcaggagagcctgggtgcatgcagcccccagcgcaagagccccatttacctggagctcaagacactcaaaggagtgtggagacaggcaaggcggcactgtccactgggtgaaagggcttccagctggctaaggaacttggactcattcataggtaccaaggagtcactggagataaccttctaccacctacccactgtgtgaccttagtcaagtcacccaacctctctgggcctcacctatgaacgggaaagtggtttctacctcctaaggctgctgagagagataaaggggaaaattctcttgcaggggccgagtgcagctgctggcactgagaattgtgtgcctttttacagcccacaggctcaaaggttagcaatccagatggggcaggggcccctcaggtgaggaatgggccccacactgagggaggcagcctcgccgtccccgctggggagcccccacccccaccccggtgctcactgcagtcgggccgcctgcggccccctctgacagcagctgcctgaccacagagtaaaggcctgtttgccattcacattaagtgacatcattaaagggccattgggggcaagatgttatctcaaaagagatggaaaactggagaggaggtggcggcaaagttggccacattaaaaagccaccatgaatgttaacattcagggaaaaatctcatcccccattctccttcccttgcaagtagccaggggccagggtcaggctgaggcattcatggggaaggagagttccagctctttgggcccgagaggtggtgtgtgtggcagtggttaggtgtacacaggggccagactgcctgggtgcaagtcccagccctgctgtttatctcagtgtggccttggttgggctgccagatttagcaaataaaaatataggaccccccgttaaatttgaatttcagataaaccaccagtaacatcttatgaatgtaagtatgttccatgcaatatttgggacatacttgtactaaaaagtatccattgtttttctgcaattcagattcaatggagtgtcctgttttttatctggcaaccccaggcctggggcaaatcacttcatctccctggacctcagtttccccaactataaaataggagtaaaagtaactcctgccattacaaggattgaatttaacgtaggtcacatacttgctgcagtacctggccctaataagtgctggcaacctttgccttgttatcctaaaggtgctgggttctgtctgcttgactggtctggtccctgacatctgctcttgactagaggtcatcagttgcaacaccaggcaattgccatgtcctggttttgggtggggctgcttgctgggggctgaggagagagggaggccctaggccagccctctgacgcatgggcttcctccacgaccagagaggtaggacatgtgaggaaggcacttagggggtagcagaagagaagaaggcagaggcaaggggcacctaaacaaacagcacagacatttgtgccaagccctctgtgtttgggtgctcagggagggctgcctggaggaggcagcatctagacaaaggaaaagtagggggctagtcgttctgcggggtcagcctggatatgcctgtagggaaccagagcacatggctgcagcaggggaatggtcagattgaagtggggggatggggaattacggacaaaccccaactgcggcactcaggcagtggctctttctcctgtgggcagagggcagtcatcaaaggttctgtttctcagggagagtgtccaggtgcgtctgaaggatggagtggttatgaaggcaggagaatgctgtaggggccactgctgtcattgggcatagtggaggcctgaactggggctgcagcaggggagagagggcacagcagggaatggctaaaacaggcggggaacaggcagtccagccacatttgcccaggagtactcaggctccttccacgtcctggacacggaggcagccatctgggcatcatcaccaagggatatgacgtcacccccaggaggacagcttgtctgcaaacccaggagctgactacccagggcctggaagcgagggacagggcaggaggacctgtgcatgtctcgtctgctctcaaaggtccgcaccccacactggacttttctttaaaatatctcgatttcctttaaagcccaactgcatcagtggccccttgcttctgccccagttacagtacacattaattttatggcagaaactaattctacccgaactccgttagtgttcaattattcctcgctgactgcctttgaataaatatccatgaagaggcttttaataaaacatcaacaagggaggcagcctccttgcaaggtggcagaggttctcaccctgcagcgggctgggccagtgctgcgtccaggggagagctgggagccaggttctcagcagggcctgggagatcccgccagatgctcccagggtggggcaggctcaggagccccatcaggaagccgggaatgtgggagctaggagagccagccccctacatgaaggaaggggtgtgtctggccacacaactgcatggggacaaagataggatgcataccaggcctcctgggtcctgcgccaggcctggcacatagagtgcaaattcaggcacccacaaagggccaggttggctgagcaaaaggggcccaactgcgcaggaggctggggcaggactggcagctcaccctgggcccaggctggtggctagcagggagggatgaggggaaggatttctgctgggaagagcagccggcccccacccaccccagtgttctgtagcttggtggaaaagcagtcctggggttgctgattctggggcctttctaggaaatacctgaatctctgcttttatgtagaagtctcccaatttttacatgccagattataatttacaatttgtaagactctgtgtgcaccaaactagacccttctgcaaatcagacagccctcaggtggccacttggtgcctttaccttgtccctgggctctgtagaagacagcattttgtaaccaggaaatcagggagtggggcaggcagggaaataagaagactgaaaggccaggctctgggggagtcccaacgctgcccccaatgctgcacccatgctgccccaggggagctctagcactggccgcagtgctgccccaggagagcctgatacttcccccagtgctgcctcaacattgccccaggagagccccaacgctgcccccagtgctgccccaggaggtccctgacgctggctccagtactgccccaggagaaccctgatgctggccccaaggctgctctaggagaccccagacactggccccaatgctgccccaggagacccctgatgctggccccaatgctaccccagtagacccctgacgctggcctcagtgctggccctgacacgggccttggcatctggaccatatatgtctccccacagggaaaaggatggggtttgactgtagccaggatggctactagatgccctctcctactctcactccacaagcccctgcaaacccagagaaattccttgtacactggccccaggaagctcggagacggaggctcctccttcagctggggcatggccttctgctgcactcctgagcgggccccagggcaggtgatggggaattgggaagagcaggtctgctcccagctgccccaggcagacagccatccccatggctaaatggatgttcaagtccagcccattaaggccatgattgccccttgggggctgccttcttgtttcattcttagatgacagcaaaagagactagaaataggcttgaacatcagagctgaggggcccctatccaggaccctcagcttggctctctaacctttctagccaagaagcccttgttctgactaaagatctgttataagccaggagtggtggttctgacctataatcccaacactttgggaggccaaggcgggaggatcacttgaggccaggatttgaagagtagcctgggcaacatagcaagattccattattaccaaaaaattttaaaattatctgggcatggtggcatgtgcctgtagtcccagctactcaggaggctgaggcaggagaatcacttgagcctgggagttggctgcagtgagctatgattgcaccactgtactccagcctgggtgacagaatgagaccctgtcaatcaatcagtcaatcaatcaatgtgctatgacagcacaaaatgcagaacagacatgagtggccttgatctgcttgacacagaggagggacctgtctgtgagacctccatggttgtcctcatggtagaatatccaagcttgctgttggaatggctttgtctgaagacgacaatgtcttcccttgaactagctcttctctagtggctgcctgtactcggtgtgtgaatattctatgcaatactggacaaagcaagtgaaagacagaagcactacagcgtcagcctatgaaatgagcctccacttagccaggctgcaagagccagaccagcctgttgtccatttttgtgtgtagagccagacctcaaatgtgtcttcattttacttactcttctcaaacctgaaaaaaaaaaaaagcagcactgtttgcaaacccctgaccccagatgcagctcccaggccaccagcaggtttgcaggggcaagggacctggccaggcccaaaggatctcagccccagtggagagggctgcagctctcttctaagccacggccagaaaacaagggccacagactacagctggggcccatattaccccaaaggcagagggaagccatccatacttctagaaacatgggcagcagtggctgccctggcgagctgtgcaggctggtaagctgggagccccctactgtgatcccaatgcccacagggtaggagtggcccctctgcactccgttccacagcatagaaacagatactccatgccgatggaagtcccagcccatatgggtattcccaacccttctccccactctccaggaagctaactcacaggcttgggcagagcttgggtcagacgatggcctggaggaactttcacctttacttttagcacaaggcatgaaatggcttgagagctgccatattgctttctggcagggatttggaattctgcttttgcttgataaattgaaatgaggaatttcccagacaagctgctgggctggcacctttagtgtgcttatggtggggtggggggcagggggaagtagagatgcccgttgtgttctttgagggtctctttcaaatggctccagcgtgtctcttatcctgctcactatctgaatgataaaaattaatatcttaattgatatcttaatcttgagccaaagaagctttgattcctttaagaagagtgattagcaaaatgatgatacttgcttaatataaggaatgaatcagctactgttccatcagagggcttccctcacctctcaagcagcctgattttgcaccttaatcatgacaaataaacttgctcatgctccagcgctattcctggtactccttaggacaggagggaatagataaagaaaccattagcatccagtcaatgcatcagcctgcatgccagccagcccgctcagcacacaacccccaggaacacagatgtctccacgccatgtaaaaaaagaggctacagggatgggaatgagatcctacctcagtgagcagaacgtaccctctgggccttgccttgtagggtcaatttgggcctgggacctgtcattctggaaagcaatggacagcagaggccaagtgctggacattggaacagacagtgtgatcctgggcaacatccttcacttctgtggatcttgtgtcacatttggaaaaggaggcaatgcctggggagcaggtggacacagggctgcaagactcctgagctctgaaccattgctgatgtacagaccccacttactcagggtcagcctggaagccagacttccttggtctgccccgattcatttgggaaacctagattgtttatatgtctgatgaatcaggtagtaaaaggttgcaaatcctaggtccttcttttgccaaagatccagggatgtctcaaaataagtggttgaggaatcctgcataggcaactggggtaaccaggttctctcactggtactgacgtcgttggcaagacccatggagagcaaggaaaagcagggtggtgcggtggcccacctgggagccgcatggggcaagggaagcacctaccaccagccaagggagtcagtgagtgatcatgctaccttacccaggaaaccatgctatttccacagatctgtgaaacctgtgggtcaggggatctccctcatgagcccgtgccaccagggccttgggtcccaagcacgccactcagctagagactgcctaagactactgagttccggggagaggggcagctgtcatcactgaggctgcctgctgcctaagatggctaagctcccagggggaagggcagcagccatcactgcagttccagtctgctgcttttcccctgccagtactggggagactaggtggtttggacccaggaggaattccccacagtgcagcacagcagctgtggcagatcaaggtcagactgcccctttaggcctgacactgacccatccctcctcacctggtggggcctccctgcaggaatttcagcaactacagccaggcgtatagggacagagctctgatctccctgggactgagcccctcaggggaggggtgtctgcggtcttcacagatcagcagacttagtcttttcccctgctggctctgaggaatctgggcagtctggacaagtgagatcccccccagcatagcacaccccctctgccaaggggtagcaaaagtgtttcattaagcagatcccatgcctgctgaccaagaccccccacaacaggggtcaccatacaggagtgttcatgctggcatcaggttggtgcccttccaggatggagatcccagaggaaggagcaggcagccatctttgctgttctgtagcctccactgatgacacctccaggtatgggagaaaccccagtgaatagggtctggagtggacccccagcaaaccacagaagccctacagaagcggggcctgactgttaaaacaaaagcaaacaaacagaaagcaacaacaacagcatcaaccaaaaaagtccctgcaagaaaaccccatccaaaggccagcagcctcaaagattgaagctacataaactcacaaagatgagaatcaatgaaagaacactgaaaactcagaacgccagagtgcctcttctcctccaaatgattgcaacatctctccaacaagagcacagaatggggcagaggctgagatggatgaattgacagaagtaggcttcagaaggtggataataacaaactttgctgcactaagagacatgagaaaacattacaggagctgttaaccagaataaccagtttagagaggaaccgaaatgacctgatggagctgagaaacacaacataagaacttgacaatacaatcacaaatatcaatagccgaattgaccaagtgggggaaagaatttcagagcttgaagactatctcactgaaataagaccagcagacaagattagagaaaaaagaatgaaaaggaatgaacaaaacctccaagaactatgggattatgtagaaagaccaaacctacaactgattgaagtgcctgaaagaggtggggagaacagaaccaagttggaaaacacacttcacaatatcatccaggagaacttccccaacctagcaagacaggccaacattcaaattcaggaaacccagagaaccccagaaagatactccatgagaagatcaaccccaagacacataatcatcagattctccaaggttgaaatgaagaaaaaaatgtaaagggcaaccagagagataggccagatcacctacagagggaagcccattatactaatggtggacctcttagcagaaaccctacaagccagaagaaactgggggccaatattcaacattcttaaaagaatttccaacacagaatatcatatccagccaaactaaactttataagcgaagaagaaataaaatcttttcagacaagcaaatgctaagggaatttatcaccactaggcctgccttgcaagagctcctgaaggaagcactaaatatggaaaggaaaaacttttgccagccactgcaaaaacacactgaagtacaaagaccaatgacactatgaagcaactatgtcaacaagtctgcaaaataaccaaccagcatcatgatgacaggatcaaatgcacacataacaatattaaccttaaatgtaaaagctctaaatgccccaattaaaagacatagaatggcaggctgataaagagtcaggacccattggtgtgctgtattcaagagacccacttacatgcgaagacacacataagctcaaaataaagggatagaggaaaatttaccaagcaaatggaaagcagaaaaaagcaggggttgcaattctagtttctgacaaaacagactttaagccaacaaagatcaaaaagacaaagggcattacataatgataaaaaggatccattcaacaagaagagctaactatcctaaatatacatgcacccaatacaggagtacccagattcataaaacaagttcttagagacctacaaagagacttagactcccacacaataatagtgggagactttaacaccccattgtcaatattagatcattgagacagaaaattaacaaggatatttaggacttgaactcagctctggattaagtggacctgatacatagctacagaagtctccaccctaaaacaacggaatatgcattcttcttggtgacacatggcacttactctaaaatcgatcacaaaattggaagtaaaacactcctcagcaaatgcaaaagaactgagatcataacattctctcagaccacagtgcaatcaaattagaactcaaaattaagaaactcactcaaaaccacacgaccatatgaaaatggaacaactagctcctgaatgactcctgagtagataatgaaattaagacagaaatcaagaagttatttgaaatcagtgagaacagggacaatgtaccaaaatttctgggacacaactgaagcagtgttaagagggaaaattatagcactaaatgcccacatcaaaaagctagaaagatctcaaattgacaccctagcatcacaactaaaagaactagagaaccaagagaaaacaaactccaaagctagtaaaagaaaagaaatagttaaccaagatcagagtggaactaaaggaaacagagacatgaaaaatccttcaaaaaattaatgaatccaggagctagttttttgaaaaaattaataaaatagttagactgccagctagactaataaagatgaagagaaagaagaatgaaatagaaaataaaaaatgataaaggagatatcactactgaccccacagaaatacaaacaaccatcagagaatactataaactcctctatgcaaataaactaaaaactctataagaaacgaaaaaatttctggatacatataacctcccaagactgaaccaggaagaagttgaatccctgaatagaccagtaataagttttgaaattgaggcagtaataaatagcctaccaaccaacaaaagcctgggaccagatggatttacagctgaattctactagaggtacaaagaggagctgttaccatttcttcttaaactattccaaacaattgaaaaggagggacttctccctaactcattttgtgaggccagcatcatcctgataccaaaatctggcagagatacaaaaaaaaaaaaagaaagaaaactttaagccaatatccctgatgaacatcgatgcaaaaatactcaataaaatactggcacaccaaatctagaggcacatcaaaaagcttattcaccacaatcaagtcagcttcagtcctgggatgcacaaaacataattctaaacagaacgaaagaccaaaaccacatgattatctcaatagacatagaaaaggccttcgataaaattcaacatcccttcatgtcaaaaactctcaattaactaggtattgatggaacatacctcaaaataatgaaagccgtttatgacaaacctacagccaatatctacagaatgggcaaaagctgaaagtgttccccttgaaaaccagcacaggaaaaggatgccctctctcaccactcctattcaccatagtgttggaggttctggccaggacaatcaggcaagagaaagaaataaaggatattcaaataggaagagaggaagttgaactgtttgcagatgacatgatcctatatctagaaaaccccattgtctcagccaaaaagcaacttaagctgataagcaacttcagcactctcaggatacaaaatcattgtgcaaaaatcacgagtattcctgtgatagacaagcaacaatagacaaaaagagagccaaatcacaaatgaactcccattcacaattgtttcaaagggaatcaaatacctaggaatacagctgacaagagaagtgaaggatctcttcaaagagaactacaaatcactgctcaaggaaatcagagaggacacaaacaaatggaaaaacattccatgctcatggataggaagaatcaatgttgtgaaaatggccatactacccaaagcaatttatagattcaatgccattcccattaaactaccattgacatgcttcacagaatcataaaaaaaacttttaaaattcatatggagcccaaaaagagtccatatagccaagacaatcctaagcaaaaagaacaaagctggaggcatcatgctacctgacttcaaactatactacagggctacagtaaccaaacagcatggtacaaaaactgatacaaaaacagccacatagaccaatggaacagaatagagaactcagaaataaataagacgcacatctgcaaccatctgatctttgacaaacctgacaaaaacaagcaatggggaaaggattccctatttaataaatggtgctgggaaaactggctagccatatgcagaaaattgaaactggacctcttccttacaccttatacaataattaactcaagatagattaaagacttaaatgtaagctgggcacggtggcttatgcctgtaatccagcactttgggagaccaaggtgggtggatcacctgaggtcaggagttcaagaccagcccgaccaacatggtgaaaccccatctctactgaaaatacaaaaaattagctgagcgtggtggtggatgcctgtaatcccagctactcagggcgctgaggcaggagaattgcttgaacccgggaggtggaggttgcagtgagctgagatggtgccattgcactccagcctgggcaacaagagcaaaactccatctcaaaaaaaaaaaaaagacttaaatgtaaaacccaaaactataaaaaccccagaagaaaatccaggcaataccatttgggacataggcacaggcaaagatttcatgacgaaagtgtcaaaagcaattgcaacaaaagcaaaaattgacaaatgggatctaattaaactaaagagcttctgtgcagcaaaagaaactatcatcagagtgaacagacaacctatagaatgggagaaaattttgcaatctatccatctgacaaaggtctgatatccagaaactacaaggaacttaaacaaatttacaagaaaaaaacaacctcatgaaagactgggcaaaggacatgaacagacacttctcaaaagaaaacatttatgcagccaacaaacatgtatatatatgtatatatatataaagctcaacatcactgatcattagagaatgcaaatcaaaacctcaatgagataccatctcacgccagtcagaatggtgattattaaaaagtcaagaaacaatagatgctggaaaggctgtggggaaatagaagtgtttttacagtgttggtgggaatataaattagttcaaccattttgggaaacagtgtggtgattcctcaaagacctagaacaagaaatatcatttgacccagcaatcccattactgggtatttacccaaaggaatataaatcattctattataaagatacatgcacacacgtgttcactgcagcactattcacaatagcaaagacatggaatcaacccaaacgcccatcaaccatagactggataaagaaaatgtggtgtgtatacaccatagaatactatgcacccataaaaaggaatgagatcatgtcctttacacggacatggatggagctggaagccattatcctcaggaaactaatgcaagaacagaaaaccaaacaccacatgttattattaataagtagcagctgaacaatgagaacacatgaacacagggagaggaatgacacacactgggacctgtcagtggggaggttaggagggagagcatcaggataaatagctaatgcatatggggcttaatacctaggtgatgagttgataggtgcagcaaaccaccatggcacatgtttacctatgtaacaaacctgcacatcatgcacaagtgtcccaatacttgaaataaaaatttttttaaaaagaaacataaaaataaaaccacaatgagataccatctcatgccagttagaatggcaatcattaaaaagtcaggaaacaacagatgctggagaggatgtggagaaataggaacacttttacactgttggtgggagtgtaaattagctcaaccattgtggaagacaatgtggctattcctcaaggatctagaaccagaaataccatttgacccaacaatctcattactgggtatatacccaaaggattataaatcattctactataaagacacatgcacacatatgtttattgcagcactgttcacaatagcaaagacttggaaccaacccaaatccccatcaatgataggctggataaagaaaatgtggcacatatacaccatggaatactatgcaggcataaaaaagatgagttcatgtcctttgcagggacatgaatgaagctggaaatcaccattctcagcaaactaacacaggaacagaaaaccaaacaccacatgttgtcattcataagtgggagttgaacaatgagaacacatggacacgggaggggaacgtcacacactggggcctattgggggttgaaaggctaggggagggatagcattaggagaaatacctaatgtaggtgactggttgatgggtgtagcaaactaccatggtacgtgtatacctatgtaacaaagctgcatattctgcacatgtatcccagaaccttaagtataataatattttaaataaataagtaggtggttgaagagatagtttgccttgcttgttctagcttggaaaattttcctcttgagagaaggaaatccgcaacctgagaaagattattctccagcccttttaaagaagaagctatgtcacccttttctgtaacatctatttgcatggcacttgactctgtttgaggcgctgttgtttacatgtttgtattgttagcttttgatacataatgaaggaccccaaaactcaatggctttggcagaacaccacagccgtttttagctcaggattctgtggctcagcaatttgggctgggctcagttgggcgattcttctgctggtctgttgggctcattcatgtgtctatgatcggctgctaattcaattgaggccatgttggtctagagggatgtccactaggacatctcatggctcttatcctgcagcaggctggcccaggcttgttcatgtgacagtgggttctaggaggcacaagagagagggcaaacctcaatgcacaaacacttttcaggcctttgctcacttcacacccgataatgttccgccagcaaaagcaagtcatgtgaccaagcccagagtcagtgtgggagggcactatgatagggatgctgggatggggaagggggacttgtagccatttttgcaatcaaccactataatattgcttaatctggacccctgcccagtgagacatgccatgcacatattaattttatggagccatgcacatcccattttatgaggtaaagaatgttgccccgcgtcacatagcaagctggaaacaggactaggcttggaagcccatctctccagtgccagcccactgcaccatcccacttctcttggttccctcccaccccaacatcagtgccaggccagggagagaatgaagtgtcatccaggagccaaaccctggccacctgtacagacatccagcaacagagacatagcagaccctgggtgaaccctccccagacatcagcctccaggagccaatgctgcagccccactgccactgtagcccccaccctggcccagcacagagtggcaggctggttatttcaatcaacggtgttttgaaaatcttgcaatttaaaaccttttaaacatgagtaggtgaggctgtgatagtgccaatgactagttgggagtacttagaggcaattttaaatgtctcctgaaatctccatgccaacggtcccatggggcaccagacaaggttcacgttgccaggctcaccctcctgttagccatttcccctgccgctgcataccctgagggcttggagttccatgcacaagtgcatccacctttaaacacctcatgcagattatttctgtctcacctgcacctgccttcatgtcaggatttgcagaagcctaaagatcagagccaggggccaggcacaatggctcatacctgtaatcccagcactttgggaggtcgaagtgggcagatcacttgaggtcagaagtttgagaccagcctgggcaacatgatgaaattccatctctgctaaaaatacaaaaattagccaagcatggtggcaagcacctgtaatcccagctgcttgagaggctgaggcaggagaatcacttgaacctgggaggcagaggttgcagtgagctgaggtcacaccactgcgctccaacctgggtgacagagtgagactccatctcaaaaaaataaaaataaaaaaaatttaaaaaggccaggcgtggtgactcacacctgtaatcccagcactttgggaggccgaggcaggtggatcacctgaggtcaggagttcgagacaagcctggccaacatggtgaaaccccgtgtctactaaaaacacaaaaaattagctgggcttggtgtggggtgcctgtaatcccagctacttgggaggctgaggcaggagaattgcttgaacccaggagatggagtttgcagtgagctgagattgcaccattgcactccagcccgggcaacaagagcgcaactccatctcgattaattaattaaattaatcagagccaggagatctgtgaggcccatgggaccagtctggctgtgggtgaagtacccaggaggcagtaccctgctctcctggctggatccccactttccacacacccgagcctcagggaactccacccaggcacgtgggcatccatcagctcgtccatcacatccgcctgtcgtccttcccagtaatgcctgacagcaaagaatgagagcagattggagtctttgcagtgacaaacgcaggacgattcttcccacaaaaggggcccagaggcagagcaccagcctgagctgtgctgcaggagggccaggagggatgactgcctgaagcataaagatctggagaggaaggtctgcacacctggagttttgctgtcctaacgcttctcagccggggcccagaactgtgtgcagaagcgatggtctatggacaattcacctgcccctcggatagcaccacccactttgcattcggatgtttgaacacagcctgtgtttcccacagtggtcaggtggaatcctggactttcaggccagatgatttgtacaacctcctccttctacaaaaagaggatgatgggggccaggacatgaactccatgacacagacagctatggccagagcagggagaattaaggagcaggagacgccttggataggaaggactaagtgtgctgctacctggagagaggagagctgtgcattcaggcccagccttgtcagggaagcctcaagtctctgtttattaaggctggagggaaccagccatcctggctgcagtggtggagtgaaagcagccgagccctctgcactactgaaaattgacacagggtagggtctcccacacccctcctcacaggcacggggctgcagcccagctggtggggtcaagagaagggaggagagaggcctccggatggtgcagatgagcagggcggggctgaaaactgcatccattcatgccgctgactctaagcaagtagtgacgtcccccgggggttttggcagcaccaaggatcgtgcagggtgcttccacacttgctcctctcataaccctggagggagcatcccactttccaggtgagaagcccagggtttatgggtgggctttccccagttgcacgggaggccttaaaacaggtgaagaccctaaggaccgacggggagccaggcgggggaccaaggcgaagcagggtgaggcagaggtgttacagcatccatggcaggccaggggccaggttatgatcacactggagagacaggtgggagtgacccagaagttgctggggtcatttctcaaagaccccagcccactcatctccaccaacctgcaatttctcagctccacactgcaacccaaagagtggacagacaaggttgctgtggaaaaaagacttacacacagcaacatcaggatgccccagacagggtgcgtgggagtgtgaagctgtgcagtttaggcaggggcatggaggggatgccgggatgcacaagggacagaattgtgtgggatcgtgtagccttcatggaggaagaggacaagcagggccagaaatgatgaggacatttctgtcctcatgtatctggggagaaggaagcatattgtcttttttttttttctttttttgagacagagtctcactctgtctcccaggctggagtgcagtggtgcaatcacagctctctgcagcctccaactcttggtctcaagcgatccagccttctgagcagctgggaatacaggtgcatgccaccacacacagctaattttttattttttgttgtgatggggtctcactatgttgcccaggctggtctcaagctcctgggctcaagtgatcctccagcctcagcctcccaaagtgttgggattacaggcataatcaaccacacccagctcatatcatctttttattaaaataaggtaatgacttggacattagagctgtcactccccacttcaggccaggcgcttgtgtctgatctcactaggatcctaaagtgtatggtctgtaaattacaaactgcagcaacaaaatgcttaatcattaaaccaaggcagccactatgcaccagcctccagctgggtgctaagcgtgagtggccccagcctggggaagcctcactgttcctggtctgctgtgagctcctaggttcttgagactcaggtgttaaccttgcctgttttctcatcccctgcaggcaccggccgtagctacaccacagacccactcttgtccctgctcctgttagctctgcataagttcctgcgcctgctcttgggacattgacagacaagaccaacccgagcatctcagaggccgcacatgacctgcccggggccctcggtgaggaccatgtcgctggatggacacagagagactgagagacgcatgaaaaagtccacatggaaaataaataaatcatatttttgggaaagttacacaaatgtagaacacctaaaataatgcatctagtttccaaataatttggagtttggcccatgcagtctgcatgggaatcaatgatttctctacttcaatgtagttttcttttctacactttccctccaagtcttcattttgcacgaactgttgagcagttatctttaggataatatgtacaaatgttggggtcaaagccttttgacaaagcaaaatatttttagtagattattgtgtttaggatttttttttaatttactttttttctttgggggcttttcttttttattaaattatttcttttgaggcattttgattaaaaaagacacatcttatcataattaaaattcactgtcaataatatttatttttaaataaagattggaaacaaggtcagacacttgtttataaactgtattgtatattgctgaagaacagttgaataaaaaacaactttgaaataacctttctacagccatggatgaatgtcaagcgttggtgcccactgcagcctggctgcctgccgttccctcctgtgctctgacaccagctgcacttttggctgggtgtcacccggcgtggaggacagcccagggcacctggctaagaccacgctgagcagatgggagcacctgacaagcctcccctagggacagggcacttcatggaggcggcagtgagacgatcccccagcctgggtcctgaaggaaaggagatcgctaggaggaggtgtgaaataagtcaagaaccactcctcccccacttcgtttcaatgaatcatgcaattcattcgcccacttggagattgtaagtcaaggtgtatttactgtggttagctttgctgctagtttgaagggggaatttggagagaaagtagggcttgccacactccttcccgtgcatctgaagattgctttgagcctctgaaactcatagatttggggcaggttacacatgccctaaggaaacgggcatgccctgggtgggggctactatttatacttcattctaagacagcatctcattagatagctggagcccatggatttgtttaaaacccagccagattttaacacctgcagtttcaataagtgtggttgtcattgatgttgttcaccaaatacttccgttctccgctggccaggcccagggcaggataacgcttcctggcctcctgtggcgggtggggccacagctctggcgcatgagctgggaatagaagggatccgcattgcttctagtccaagacacaggattgctagtgcgacgccctccaaagcacttgtcctctaacgtgacgactcgcagcgttcacatcagcaagtgttcttccagcctaggtcgctgagtgactgcgatgaacacagcctttcctgtggccagcgctggatcctgcggccccatgagaagtctgccattgccgcttcacccactcatcttcgggcattatcgcagcataagccagcctgtcctgattggctcagtgtgtagttgattgactgtatttagctcaggggaggagtaattgtgcatttggacagtcccacgtgtacagagacccccaggatggagctgatgtcaggggaggcctgtgtggagagaacgtcgggacggctgtttctgatgggtacattaacttgtttcacatttcctttatattgatcagcaccaattgagctgtaagtttaatcactctgtctggtggatagtgattctgtccagaaggatcatctctttttatagttaactcaatactgcagcagctaatgtcatgtgaaatactggcccagtgtgctggagagcaaaccgtacttcccagataccagtggaacggggacaatgtgtcagtaagggtgacgttgtaccagatcgttccaggggatggagggctggggagtcattccccatcaccaaaaccagatgcctctgtacaaacacaggtagtcaggtcccagcctggaagctcccaacctttagcgtgatatgcacaggggaggggcaagtgtgatgggcacagtggagggggcaggtgtgatgggcacaggggagggggcaggtgtgatgggcacaggggaggggcaggtgtgatgggtacaggggaggggcaggtttgatgggcacaggggagggggcaggtgtgatgggcacaggggagggggcaggtgtgatgggcacaggggagggggcaggtgtgatgggtacaggggaggggacaggtgtgatgggtacaggggaggggcaggtttgataggcacagtggagggggcaagtgtgatgggcacaggggagggggcaggtgtgatgggcacaggggaggggctgatgtgataggcacagtggagaagctggtgtgatgggcacgggaggggctggtgtgatgggcacaggggagtgggcaagtgtgatgggcacaggggaggggctggtgtgaggagcataaaggaggggcaggtgtgataggcataggggaggggctggtgtaatgggcacaggggaggaactgctgtgataggcacaggggaatgggcaggtgagataggtagaggggaggggcaggtgtgatgcctacagcagaggggacaggtgtgatgggcactgaggaggggctggtgtaatgggcacagggaagggactgctatgatgggcacaggagaggggcaggtgtgataggcacggggaggagccggtgtgatgggcacaggggagggaaggggctggtgtgataggcacaggggagaagctggtgtgatgggcacaggggaggggctggtgtgatgagcacagaggagaagtggtgtgatgggcacaagggaggggctggtgtgatgggcacaggggaggtgctggtgtgatggacacagagaggggctggtgtgatgggtacaggggagggggcaggtgtaatggctacaggggaagggcaggtgtaatcggcacagaagagaagctggtgtgatgggcacagaggaggggctggtgtgatgggcacaggggagggactgctgtgatgggcacaggggagggtcaggtgtgatgggcataggggaggggctggtgtgacaggcacagggaagggggtcatgtgtgatggcatggggaaggggacaggtgtgataggtacaggggaggggctggtgtaatgggcacaggggaggaactgctgtgataggcacaggggagtgggcaggtgagatgggtacaggggaggggcaggtgtgatggctacagtggaggggacaggtgtgatgggcacaggggaggggctggtgtgatggacacagggtaggggctggtgtgatgggtacaggggagggggcaggtgtaatggctacaggggaggggcaggtgtaatgggcacagaggagaagctggtgtgatgggcacaggggaggtgctggtgtgatgggcacaggggaggggcagatgtgatgggcacaggagaggggcaggtgtgatgggcataggggaagggctggtgtgatgggcacaggggagggacttctgtgataggcacaggggagaagctggtgtgatgggcacaggggaggggctggtgtgatgggcacaggggaggggctgatgtcatggtcacagaggaaggagcagttgtgatgggcacaggggcgtggccttgtgtgatgggcacaggggaggggctggtgtgatgggccctggtgagaggaacaggtgtgctttggagaaaccagctttttctgcacaaagaggattcccctcaaacacagaaaattattcctaatatctgcctcctggggacagagaacttccaggtgggaagccgagcatgaggctaagcatgttccctgaaggggaggctgaacccggcctccagcagaagttaatggaactgagactggggctgtcgtggggctggaagccaaggcaaatctctggacccaggcttccatggagtggctaccagcattcccactggtccagggccccggacacaaagaaaggagaagttaagtgcacccctaagtatccgcagtgccgatccatggggtctgggctcctgttttctggggtctcacgcactccgagaatgaggacaaagaacacttagcctgcactgtgttttatggaatgcatacaaaccagaagagagaagcgccctccagaaacaaaaaccgtggcgtggtgctcactcccaaaactgcctttccctttggagtttgctttcagcctcggcagacatgggctggggttggagagcaagacaatttatttcagtttgggaagaatgcactgtgggcggcctcgggagctcgggtgcaggctgacaggacccccgcctgcttgaagggactgtggagctgtgggtctgtgtagcaactaaatccaaagtgagggacaggagtccagagggagtgcaaactccaccccagcccagagctgagtgacagcagggaagagaaggagggcagccagggtaggggcacgtggagaccgagccaagcccagacccctgtggaggagccctgctctgcctggtgatgaggattgtccctgattctagcccctcatgtggtgctgacccacctgcgccctccaggcagcggccaacatttaggggcatagcctggaaggaaggacaggaattcccagaatttgacaggaggtggtatgagcagagctgcagcattctgagtttcagttctgtttcaaccccacactcctggttacagctctggctcagaaaacaacagctctgtcggatccaagcctgccgttggttggaatacagcaaacagccatttgtgagctgctgagctcctggctaaagggacttctgcccctgccagccaggggaacagtttttttgttttgtttttttttttttttgagatggagtctcactctgtcgcccaggttggagtacagtggcgtgatctcggctcactgcaacctctgcctctgggttcaagcaattctcttgccttggcctcccaaataactgggactacaggcacccgccaacacacccggctaaatttttttgtatttttagtagagacagtgtttcaccatgttggccaggctggtctcaaactcctgacctcacgtaatctacccacctcggcctcccagagttgggattacaggtgtgaggcactgcacccggcgagttcttgcctatttttgcactgcttcttccagtgggcccatccccactttgggtgacactgggcattcattttgcctgcatttcagaggatgcaactcctgcttttcctgggggacaggtggccagaggctttgatgcatttgcccctatatgcatgcacacacctgtatgtagcagcctgctgctttagaacaccatttctttccttctcactaaggctgcagcagcaggagtggtgcagcactggtgaaacctcagccaactgggcgcccggtctccccagaatggagctgctgcccctcagggctccctgccttcatcagccaagaagagcctgcacaccctaccacagcataaatacaccttttacctcatgccaggggccctagaaacacatggaaaacccacgacctttatgagggacctgccccactttgtggctgcagacacaacatgaggtagagtctggaaacaccaccaggggtgaccccttttaaatgacaaagacccaaggagcaccaaaaatatatttcaagtcacagaaaacatgacttcacaccaagcctaacttgccaccaactagcaaagacccaacaaagatcacatgtgttccctgtacctgattgtttaaaagggagaaatggtaagtggactcttagtagaaagcatatatggtctcgtttagattttgaagttagaaaagattttttaaatgagactgaaaaagcggtaattataaaagaaaatatggaccgggcatggtgactcatgcctgtaatcctagcactttgggaggccgaggtgggtggatcatgaggtcaggagttcaagaccagcctggccaacatggtaaaatcccatctctactgaaaatacaaaaattagcccagtgtggtggtgcgcacctgtagtcccagctactccagaggctgaggcaggagaattgcttgaacctgggagccagaggttgcagtgagctgatactgtgccactgcactccagcctgggtgacagagcaagactctgtctcaaaaaaaaaaaagaaagaaagaaagaaagaaaatatagacaattttgactacattataacaaagagcactcgtttaccaaaaaccatcacaaagaaagtgaaaagagacttacaaaatacacccaagaaaggattactatcaaacatgtacaaagaattcctagaaatcaataagaaaagcaaaaacaggctgggcatggtggctcacacaggcgaggcaggtggatcacctgaggtcaggagttcgagaccatcctggcaaagatggtgaaaccccgtctctactaaaaatacgaaaattagccaggtctggtggcacatgcctgtaatcccagctactcgggaggcggaggcaggagaatcgcttgaacccaggagacggaggttgcagtgagccgagatcgagccactgcactccagcctgggcgacagagcaagttgactccatctcaaaaaaaaaaaaaaaaaaaaaaagaaatgcacaaaaagtacaatgggaagatggaccaaggatgtgaaccaccatatcatgggagagaaaatatggccagaaaaaaatataaaaggttttcagcctcaatagttacaagagaaatgcaaatcaaggccacagtgattatgcccacttaattatcaaaaatttaagtctgacaaaggccgggtgccgtggttcatgcctgtaatctcagcactgtgggagaccaaggcaggagggtcacgtgaagccaggagttccagaccctgtattagcatgacagcaagacctcatctgtgttagtccattgttactgcattgctgtaaagaaatacctgagtctgggtaaattataaagcaaagaggtttatttggctcatggttctgcaagctttacaggaagcatgattctggcatctgcttggcttctggtgaggtctcagaaagatttcacttgtggtggaaggtgaagtgagagccagggaggggagagccgtgaggagagagacgaggaggggatgggtgccacactcttaaaacaaccagatctcaagtgaactaactgaaggagagctcactcaacaccaaagggatggcatgaaatcattcatgagggatccgccccatgacccaaacacctcccaccgggccccaactccaacactggggatcacatttcaacatgagatttggaggggaccaacatccaaaccatattaccgtctttgcaaaaaaaaattaaagatagccatgcatgatggcaagcctgtagtaccagctactcaggaaggtgagacaggaggatcgcttgagcccaggagttcaaggtagcagtgagctgtagtcacgccactgcactccagcctgagttacagagttggaccgtatctctaaaaaactaaaaataaataagattctgacataccaagtgttagagaagttgtccatctccaagatcacctaagcattgactgtgggtgactgtgggagtgtaaatcgatacaacctcactggaaaacactttggcactaactgttaaaagtgaacattcacatactgcgacccagagattccaatccttagtagcaaaatctctttctcttgtgctctggggaacattaaaaaaaaaaaaaccttcaaggcagccccattcaataccctggaaacagatgagttcccatctataggagagatgatgcagatgctgtagacagttctcacaatgatatgaacacgacaccagctactccatcaagggtcaacgtgaatgaactgcaaggaacatgcaacaaaacactgagtcttagcatctattagtggggaaaacccccaaaaagggcagagtgctcacgtctgtaatcccagcagtttgggaggctgaggtaggaggatcgtttgagcccaggagttcaagaccagcctgggaaacatagagagactctgtctctattaaaaattttaaaaatgtagccaggtgtggtagcatgtgggaggctgacgtgggaggattacttaagccagggaagtcaaggctgccgtgagctttgacttgatagcaccactgcactccagcctgagcaacctagtgagaccatgtctcaaaaaaaaaaaaagaaaagaaaaaagaaaaaagccctgaagatgacatacagtataatacctttgtcataaagttaaatccaaactaaaaccaacagatagagggaggatggatggatggatggacagatagacttcttaagaaaacacgtagctaagataaaactgtcttcaaaggaaagcaatggaaaggtgaagatggatacaggatcgtggttaccttggtatggggaagcagaggtataaggagcccacaagtggatgaaggtcgtcatcaaactcttagttttcaaactgagtgatgggttagggtacatctcgtgttatcaaaaatgaatgaatggccaggtgcggtggctcattcctgtaatcccagcactttgagaggccaaggtaggtggattagttgaggccaggagttcgagaccagcttagccaatatgttgaaaccctatctctactaaaaatacaaaaattagctggacgtggtggcgggtgcctgtaatcccagctactcggaaggctgaggcagcagaatcacttgaacccaggaggcggaggttacagtgagccaagatcacatcattgcactccagccagggggccaagagcgaaactctgtctcaaaaaaaaaggggagaggggagaggaaaaaatgatacagtcctatccaggacttatattaaaacaaaaacaaagtaccaacttttcttttccacagtccccaagacaaattcacatctaactccatctcccacccagaggttgcaaactagcacttctcaagctgcatctggctgcagacatgctatgtttgacgttcacagggatgtttcttgttattttacaatatcggaaagtctcatgtaaacatccaaatttctcctgtcctctgcagcaacatggatggagctagggaccattattctaagtgaactaattcagaaacagaaaatcaaataccacatgttctcactgattagagagctaaacagtgggtacatacataacgacatgatgagaatgacagacactagggactccaaaagccaggagaatgggagggaagtgagggttgaaaaattacctatcaggtagagtgttcactgttcgggaggtgggtttgctagaagctcaatcccaaccattacactatatgcctatgtaacaaacacacacatatacttaaaatttgttttaaaaacccaaatttctggcttctcctgaaaaaaatataatatgcagccacacggggcccatattcctatgtggtgacaactggtgggtgccaagtaacagctgcccccatgatactccaggaggtccttccctggctctactctgccttcaccctctgcagcctcggccagctgtggtcactgtaccggcctcacggggccagaaaacattgccgccattcagagtgtttctcaaagagagctgaagcaaaagaagttttagggttaaccagaatcccattcctgaagcggtaattgatgttttcgaataacatgtatccagttttttatttaagaacaccacaaagaagttaaattagattgcagataacctgcgctttctttttctgtgcaagatttttctgtgcttttttattttggtaaattatagtatacaaaatgttctggttttgctttgaaagaaggtctgctgtgtgtctaaaacacaatctactaacatactcttatctgcataaccgattaactccctgtttgtgaccagacatctttctactccctaaataccaaaagacgtggccattattgtttaagcctccttcacggactcatttctaagccctttgatggtaaaattttgctccccgcccctgcacctccacctgccatggtttctccaaactgtgccctaatgaattggtgcttttaactaagacagaccacggtcacttttcaaaacgttaattcccataaaatgggatgtcagttttacaaggaaggctctcctttatcagcaaaaactgattccatttgactgattaattgtccttagaactgtcaaaggcttccagactagggaagacggcttgggaggaggcagacatgcagccttgcgatgtggggcactcctgggctggggaaaacaggagattacaaatgcacaaataattaattcaaatcaatacagcgaggggttcaggctgagagacattcaattaagttgctcaaagagaagatgctgatcttcagctagtcctctccatgctgcaaataatagagcatttttaatttgtgcagcagggatgttaatcttttgccatgtaatccagtccttggggaatgccataaatatgtggcactgcgcatgtgaggctccctgaggagggcactcaatcaacccagccctggctttcctgcctgtctgtatgtcaatctctcaacactcaattaggaaatatatgataggctaatagaggatggatggatggatggatggatagatggacggatggatggataaatggatatagaggcagagacagacaaatgttcaaagattatcagacatcccttacccgcctcccccacccataaacactttatgacttctggattttgcctgaaccaacagcacaaataaatcccaaggaattattcacatttcaaaaggattcacttcagaatgcctttaaatagcaagctcctatagcatgtttaaaataggatctgaatcccaattttattatacagagaaagagaagcacacacatacatatgaataatgatttagaaggttagacaccaaggtgttaaaagtttatgtttctatgtaagtagtattgtagatactttaatgtctgactgcggtctggcttctctgtgattattacttctgtaataagataaaagcagtaaagtatttttaatttaacaaaagacaattccaccccccaaaaaatgtaagcttcaatttataaagatgtaactctccacctgttttcagaagaacatttgctgtgtaaaaagaggctctccaggaacatgctatttagtcctcattcttcgataactgagcatgggggctctgagtacatcacttgggtggggagcttgaggcacctctgtggtcccctaccacacccactacaccaagagatggcccaccaagagttgtcctggtggcaaccaggactcaggggaaggagaggctggaaatgtggggtgcctctgggaccatggacctccaaagctctgcagcacctggacattaactacgtttattcattcagcaaacacacattgatcactactccataaacagccctgtatgggagaaacagataaagtatgcaaggatcaccccctaacccccggtaagggagctggtggtctggtaagaagaatcaacacctccacagctaagtggaatacaagctggactgtgagacccacagtagggatcttagcaagggactcaggaagggaaacaattcattgtaatgggtgggggtgggggagatagcagggacttatcaaatgtttgtggaaatgagctcaagtagcatttgagctgggtcttaagaggcctcctcgtctctccctgatgctcggagagtcttattagacacagacagctggatctcccctacaaccagagccactgtcgtttgggcaaaagtcaatccttcctcgccagcggctgtcaccagaagtggcagcctcattgcatctcattctgaggcgtgagagcctcagaaacaagagccagtgagtcttggggtatctgagccacaggcagcccgtgtgggagtctcggagcccactcaagagcgtggataaacctcgggacaggattgtgacaggcagcatatgcagaaagttgagtcagccctggagagtggtgcatcctgagcagctccagcaggcggtgcctgggagagatgggctgcaccgcgtgaatcagagggcacctgtcatgatggagacagatgtgtggggtaagccagccacaccacaaatcaaaaataacaaggaaaactctgggcaaatgaaactagagaaacgtcagctcttagccttgccaaagccgggctgctctgtgcacagagactcacccgagacaacagaaacagggctgggtggacgttttgcaaatgaatagtcagagagagccatgggttgcatttgttgacggtgtcagaaaactaaaatcagtcaaataaatgagaaatttgccatttcccccccaaattttatgaggcggggactaagaaaatgatccatcaagcaggaaatattttagctgttggtttttatttattagagaggtgtacagagtttggcatgctacagtgtacattttctacaaaatagaaatccataaaagccagagagaaagttgagattttgtccctgcttgttgctgtgaagttctccgtttcccaatgtatgtcactggtaaagatgaaaaggggaattttcactgtaagatcatatgcaaatgaccctcgagatgattcagccactccaatgtggaggcgtctactatcttcccacaacctggcttactcaggctttcagggctagagatgtgaactttagctgtatcctgactatagcagaatctttttgcaccatgcatgacattcccgcagccctccccgacttcaacccctgctggggtggaagcttctaggattgacccaggctcctgtacaggagaaagagatactcaagggggaaacccgcgcctctctgattttccctccagggcttcctctaagccatgttgcctgtttggctcaagatcaggctctgcggaagcacactgcagttggatggctcctggagggtcccacaggtgaatgtctgcatctccctgtccgcaggcaggtccttccggaaggcgttgtgcctgctcctcagtgtacagccacacccctgttgcccaagcagcaagctccatagcacatcctttcttggctttttcttcttccagactcacactctctgctccttctctcccactttctagactgacccccaaataaatgacttccccctctgtccttgccccaggctctgatgagaacacagactgtgcagatgtgtgataccagcatccatttccctcactggggcatagactcggtgtttccttggggaattaccatgctcttgttgtgcacagatttgagggaggcagatccaggagggaaccaaagtggccagatgctcacttccccatccccgaggccacctctgcgacaagaactgactcatgcccgagccaccagtttcccctggaggggagcaaggatgaggggagcagctcgctgccggtccccagggacaggggcttggtttgctgaactgtctctgctgtatggccctggctgtggcttctcctgcctggcccacccagctcccttggtgccacccagctcccttggtgccgcctacctcccctgagctcctgacacccctttccactaccaccaccaagagattctccccagtggaagggaacggggcaggttctgtgggtgccacccagatccccagctgacatggttagctgcagtgacagagccagctcaagccagcctaggctagccagggtagtatatcagtatatgggggagcttcatggaacccaagtgtggaatttcacctgcgcgtcagggtggggttatgatctgaatgtttatgtcctcccaatattcatatgttgaaatcctaaccctcaaaatgatggtacaagaaggtgagggcctttgggaggtcattatgtcatgaaggctctatggaattagtgtccttataaaagagaccccagagggaccctcactctttccatcaaggacacaaatagaaagcactgtccatgaaccaggaagccctcaccagacaccaaatctgctggtgcctccatcttggacttcccagcctctagaatggtgagaaataaatttctgttgtttataagccatgcagcctatgggattttgttatagcagcctggatggactaagacaccatcactacccagtgtctaacacatctgcttcatgcccctctctctacctaccggcttccttcacttagggccgcgcagctggtgaaaaatgacccactcccaaatattcgtgatacttgcagctacccaaagaaagggcgttcacctctttctcccactttctctctctttctctctctctcttcctccctccctccctctctccctcccttcctttcctccatttctctctctttctctctctctctctgtctctctcatgcatacagagagagagagagagagagagtcctaattcaaattcccagagaagcactcagattggcacagctcgggtcagacaaccacccttaattcattcagccaacgatgacaaggcacgaggagttatccagtgagactgccagccccaacccctaggactgccagccccaacccctaggactaccagcctcacccccactgttggagggaacagagagccaccgggatctgggaagatgctctaaaggatgttcaccacagcagcacttttcaacagtctccatgcatacgaatcacaggaagaccttattaaaaagcaggtcttgcttcactgggcctagggtaaggcctgagggtctgcatttctagcaaactctcggaggctgctgatgtggctgtacaggacccatacgttgagtagcagagcattccagattgggcaaggaggacatactcacccctcttcatctcaccaaggaagccacccacccctccttccttccaatgagagaaatctgtttgcttaactgcaaagattaaaaggaagccttcttgcttgttgagatatgataaggggtgagttgtcactgacattttgatgaggctttttttacaccgggacatttaacaaagcctacaaaccaaaccattaaatgttcagccaagcaattactttcaccaagtagtgagcaaatcagatcaaatcagaccccagccctaagcctcaccccatcatctgccagggatggtgatgggaacatcactgataaattataaatggtaattctacatctggacacagtacttttgccttgaccacatcaactggccacgtcaaagtggtctgtcatctgtcccacttgcccagtccccagagtcctcagctatttaccctgcgcccccagcctcccgtaaatctcaccccctgcagtcgtggtgtcttctgccttctttcaagatggatcctgatctgcagagaccctgatctgcactcatcataatgtgctttcccctccctggtctccatctgctcttgtcctgtcctgtttgtgatctcgattgccacaggtaccagccttccctattccaactgctctttgtggctgcagccagtgtggcccttcagagaccttcccttcttgctatcagtctgcaagtggccaaggtctctgcacaaggcaccccaggcctgggtcagggaccatttagggcagcagcaccatcttaccggtgaccctacaaactgaatgctacagtgcctgctgtgaggctgccaggtggtggaggtccatatgtccctttactcagagcctcagaaacaggcatatgggggccctggggggccacatggcactgtgttccggggaccaccttctaaggggaatcctgccaatgcagaagcaacacagccatgcatcaggtactcagcacttcacacggccactgtaccctatgttttggcccaccctctgcacagctgccttctggaaaagcaagtttcccaacactatccagagccagaattgggacccagaatgtgcctgtggtcttcacggaggttaatcttggatgtaggcctggctccggagccaagagtcttcttctgggcatccacgctcgcaaagtagcttgcaaccctcattagggaagcaacttctgagaagagaattctgcatccctgacctccacccagagaacccccctcctcaattcagcagcatggtcaggactggttcaatcgcgagtaatagaaaaacaactcatgtgactacaaagtgcaggcatggctggacccagggtgcaagcattatcaggcccaattcttctcctgtctcttggttctgccttccttggactgacctggctgcaaggcaggctcctctccatgtcttgactccaagggctcctgcctcacatattcctaatttagcagctagtggaatgggtccattggtctggcttgggttgtgtgccacacggagccattcacggtggtcagggagacatggtgctcttcttggccaggcatgagtcataagcctaacactagagctaaggactgagggtgggaggtggggctccccagagagaagttgaggagctgctagcaaaagaaggcaagcaaatcacaatttggctaaaataactaaacttttgggaataacacatagcattttgacttgcaattactacaaataatattacattaagcagttaaccaacagactcaagaaatagcatgtcctggataattccatatttctagttaatgtagttaagccccacacaccatactctcagattgctgaaattcttaatttgggttgacccagatgcagatcctgagattaggatttgagcaaaagtagtctctttgggaagtcatgaaatatctgcagggtagagggaaagtgagacagggaagggaagacaccctaaaaagggtgtgctatcaggccagttaccactacgggagattagaactaatccaacaggggaactgtattcacctgttcctacgctgctaataaagacataccagagactgggtaatttataaaggaaagaggtttaatggactcacggttccacatggctcaggaggcctcacaatcatgggggaagacaaggagaaggaaagttatctcttacatggtggcaagcaagagagtgtgtgcagtggaactcctatttatataatcatcagatattgtgagacttattcactaccataagaacagtatgggggatcgcccccatgattcaattatctccacctggcctgcccttgacatgtggggattattacaattcaaggggagatttgagtggggacacagccaaaccatatcaggaacactggggagactggaactaatcctactggggaatccaactggggaactccaatcctgggggagattgcaaaacacacctcagagctgtcctacccaagggatgagggaggtggggtattgatactcccactgctgtctgtcattattgaaagctgttcttggggctgctgacttcctggcacttctggcttgctgctcccattgacgaaggagccccaggcaaagagatgcaggttctggccattggaagtgggagtgacatgcacaaaagtgggaagggtgagaggatacagacagggagccaaccacatccactacaccaatttccaaagaataactatgctgaattaccttgccatggaggcccaacagtcactggagaatcatgtaactcctctagggctatcacaggaatatcattgtctgctgtgtcaagccctttacaaaaatatagttaataaagatttttgatagaccattgagtgaagtctctttatggtgtttaaatgttagaaatgtctgcttggagactgatactttatttcactttggtattattctcactaagaattttaaaacattttataaataacatggtctctaagtcatcctgagaaaagaaaactgaatttcaagtgggtttttttttttttagtcaatttcttttttaaaaagatccaaaccagttgcataaccttctggaaacaaagtcactgacagattgatttttgcacatttcactcaattgttctgacttttgactagaaaccgccacagcaaatgtaaacaccagcctctggtgggttactgtggccagtccacagagcttgtccccacttgttttcatcccaaagaaataaaaacagaggttaaagaaggaacactttgttctgggagagcccaagctgaggatctgatcattacacataagagtcatcccaaatgcaggccattaacctgacgttcacagggcactttaccgtttaagaggcaatttaatgtccatcatttcatgtgaccctgtgagatgggaaggacatgggttatgagttccactccacagacgagggaaccaggcctcaccaggcggggagttcatgaggttgttggaagaggtagaagccaaacgaatctctaaactcaccacgttctatggtgaaggtctttctgctaccctgttggtcccagatgttaggtttctcatgaattagtaaaagtatttgattgaaccatctggcattgccatttttatgggtcacaatgatcaaatacagcaaatttgccattttatgggtcaaaaacagtcaaacgttagcaatttcacatggtctgacctaatatgaaacaattggaaagctggttttggtgagcaagaacactgagaaaaacttcactattaatgccatttcagacgggaaggacattttaaccaaaaagataggaaggttgcatcttggcacacaggaccttgtgcttttgtgcttgctgtgctgtccacgttgtgctcattggaccaggtttgggagccagggagccatgtcactctggagtcttccgggctgactttctccctcatgaaaagaaaatgctaggggagcccctcttggggccaccgtcatggaaactctgtgctccagggatagggctctgattccggccccctccttcatcccattgacctgcctgccagccccactggccccaagaaaggaaagagggtggcaggtaggaggcagctgtcatctgatcctcaggtaaggcatggcaaagcataggagggctgcaaaagtggcaagcaatgtcatctgcctgtggaaccacccccaccaaatagtgaagattagatacacaagggagcaactcctccaatgcatctcacagcagaaagctgcaggctgagtaagagtgatgactcataatgcacaactgttttaagacaatacatttttatgtttttaaaaaaaaaaaatttgtgtgtttagtcttcccctgcaccaagctcaatattcaagtcaagcattttcaagaatgggccccacagatcatcatcttcactgcattatttctaattgcattattgcttaattgcagagcaatagagtgtgtaatttgagagctgtgatgcctggggggccagggatgatttaactttccatgcaaagcccagagctggggaaaactggcctgaagacagcagcaggggtacagcttccttttccagctgacttattgaatatctcacctctgccacatcagagaggcagctgagagcaaagaccccttgcttggatcacacctcatgctacccttgcagcagaacagcctcatgaagagacctgaagttcagaaatgatgcatccaacagtcattctatgcctgccactgggctgcatgagcaccaggaatgcaaagaaaaacagagcttggttcctggcaactggagagccagagtctagcaaaggggaaacagagctgtcaacagagccactcgatgatggagacaagctgaggaggcttccttgagaaggggagcctagacctagtctctattaaaaaaaaaaaagaaagaaagaaagaaagagaaagaaagaaagaaagaaagaaagaaagaaagaaagaaagaaagaaagaaagaaagaaagagaaagaaagaaaaacagaagaagaagaaagaaagaaagttaggtaaataagggactgtgagactaggtgctgaccagacctgcttcttttggatcccatcgattggttgagtgctgccagaaggagccagtaagtggggcggggtcggtggggggtgcagatatagagaaggggagaaggaaaacaaaggtgtgaatttggatgaagtcccagactcagcctaaccccgtgggaatctctggagtataattgcacctcagagtttgacctgcatgaaggcaatgatgctgggcttttttttttttggagacggagtttcactcttgtcacccagtctggagtgcaatggcgctatcttggctcattgcaacctccacctcccaggttcaagcgattctcctgcctcagcctcccgagtagctgggattacaggcgcccaccaccactcttggctaatttttgtatcattagtagagacagggtttcaccatgttggccaggctggtctcaaacgatgctgggcttttcttctcccaaccagtcgttgactatgggctgctctgagatacacaggtacttctctgcatgcgtgggaggaggctctagtgcccaagagcagcgtacaggaggttgcaggttgcaggtgcagtctattagcagaaagcacacagatgcttggggatagctgcaaggagttgataaaagtgatccaagaggatcaaggtggatacggcctccaatctgtaaatgccatgtgacttgaccctgaccataagatgtggatggaacaagatttgccaaattcagatctgcacttataaaccccagcacaattagccacttgacctgctctctttccagttagtgtaagtcctcttagttcttccttttcaaaatcattttagctattctagattattttacttgcacataaaatctttaattagctattttcgattcttttagttccacataaatttttaaactagcagatcagtttctgaaaaaaaaaattttttgaattttgattgggatcatgttgaatctgtagatcaagttggagacaattaacatcttaataaaactgagtcttctgatccatgaacatggtatatttctccccatttttttagatctctttaatttctctcaacaatgttttgtaggtttcagtccacaagtcaggtacatcttttaccaaatttatctctaggtatttcaaatatctgatgctatttcattattctaaatttaaatttcttattgttgatcatatatagaaagacaatgtacttgtgcatactgatctttttcttgcaacattactgaacttatttataagttccataggtttttttagattaattccttaggattttttccataggtgaagatgctatcagcactatcagcaaacaaagatggttttgcttcttccttttttaactgtatgcttgtttttttttttttcttttcatgccttattccactaactagagactctggaataatgttgaacagatgtgctaagagtgaacatcttgtcttgttactggtcttatgggaaaagcattttgctttttactgttaagtatgatgttagacttttcacagaaacgttttatcagcctaagaaaatttctctctattgctagtttacttaggatttttatcatgattggatattggattttgtcaagtgatttttctgtatctgttgagataagcatatgattttcctttttagcctggtaaaagtgaatcacactgatttatcatcaagtctctccttggtcatgattttttaagttctgttggaaccaacttgctaaaattttgctaagaatttttgcatctgtgtttatgaggaatctctgtagttttcttttcttatagtgcctttttctggttttgagattagtggtaatgctgacctcatagaatgaattaggaagtattgcctcatctttaatattctggaagagtttgggtagaattgacattatttctttctcaaatgactcaagccacctgggcttggaattttctttgaaggaagatttctaactctaaatttaatgtcattaatagatatagggctatttgggttatctatctttttttaataagctttagtcatttgtgtctttcaaaaactttgcccacttcatctaaattgtggggtgctgagtgtttttcctgattacctgtgtattacaaggtctctccattctgactattgggaatatgacccagcccagcccttgtgatttccagaaattgttctacctttttctttccagcgttttttcactggcctcaagcagcttcctcatatgcaggcattgatgggtactcagcagaagacctgagtgggaccagcagatctctgagcactctccacaccacactgtctctgcaactcaaagaaaccactagactctgtctggacacccaggcacacccccatccctgtcctggaatctcgctccagacagtgagctcaggcaatccaggcctcatcccatttgtttcctttctctcatgagtcactgccttatgctgccttttgatcaatgtctaaaaagagttgtttcaaatattgtatctgcttttttagttgtttatgatgggcaggtaaatccaatgcctgttaccttatcacagccagaagcagaaggctactctggacattttgaatttgaggttcctgcagaataccaaactgcagatatctagcaaactgttgtaagtaatgagagaggttgcgaccagagataaattttggaagcaaatgcataaagctgttagctaaaacacagctggagggagcttctagtagaggaatgatggcatcttaaagacaaaatccactggagcagggtagacacaaaggagaacatgatgtgggaaagcagaagaaagtgagaaatacatgagaactcactgaagaaggaggtcgtggaaaccagggcttggagagtttcaagaagctgaaagtatccacagtgcctaatgccccagagactatgggcatgatgttgggaaggcaggctccaggcacgatgccatcatgctgtgagtgcacctgtactgttgcttcgtgtgtgctggccccactggttttgctaatgtgacaaactggtcccctctgccagagaagattgaggtggggtgagtgaatgagatgggaagaatggcacagaccatactttcacaaagcttggttgagaagggagggagagtagtagctagtagtagtaccagaagaccagggcaggcagtggcaaaatttcttagtttcaaagtcttaagcctgtgaacagtctaaggaagaaaagggaatcgtcagatagagcctgggacagggaaggaagagagttgatggggcaagataccatgagatgggaaggggaaagagttttgccctgggcgggagaaaagaaaatgagtgccaaagtagaaaaggtttcagatgagataacaagtctgtgatccaaccaccactctccctatttaccaagagagtttgacaacacacaggcaggtcacatgctagcctgaaggcagcctagccacagcctcagattggttcccactagctcaagcctgcaatgctgagaactgttttcatagctggtggcaggaagtcccataaatgcactgaggtcacaggcatctgtgcacagtgctcaagaccacagtttagggctgccttgagtcacccaagtgttgtgactcatacaagacactaaagaaatccatcttccatagcatctgtacctgaagcattaggttccacatagcagagggggaaacatctcgtttctttttcttttctttttttaacttttattttagattcagggcgtacacgtgcaggtttggtacatgggtatattttatgatgctgaggtttaggatgtgattgattccatcacccaggtaatgagcataatactcaataggtggtttttcagcccttgcccccctccttccctgctgtaggagtccccagtgtctatgtttgccatcgttatgtccatgagtccccagtatttagctcccactcatcagtgaaaacttgcagtattttgtttcctgtttctgagaaaattcacttaggataatggcctccagctgcatccagctggagaggacctaattttgttctttttcatggctgcatagtattccatggtgtatatgtatcatatttttctttatccagtacactgttggtgggcacctgggttgattccatgtctttgctattgtgaatagtgctgcagtgaacatacgagtgtatgtgtctttttggtagaatgatttatattcctttgggtagacacccagtaatggaattgctgggttgaatggtagttctgttttaagttctttgagaaatctccaaactgctttccacagtgcctgaactaatttacattcccaccaacagtgtacaagcaatcagttttctctacagcatcatcaacatctgctattttttgactttttagtagtggccattctgactggtgtgaaatggtatctcattgtgagaaccacatgatttctacaaagtatatctactagatctctcacggttgacagaacttggcaatctgaactgctttaagccaaagggggatttatagggctggatgcagctgcagctgtatctagaactcagaaattccaagtcctggcctctccctccatctctcaggtctgcctgatgcacaggtggctacatatagtggcacgtcccccagctttacaacagtttcagagttggctaggcatggtggctcacatctgtaatcccagcactttgggaggctgaggtggaaggattgcttgaggccaggagttcaagaccagtctggacaacatagcaagtccccatctctactaaaaataaagaggttagccaggtgtcgtggtgcccacctgtgatcctagctacttgagagtctgaggtgggaggatcactttagcccgggagattaaggctgcagtgagccattgattgtaccaccacactccaacgtgggtgatagagtgagacccatctctagaaaagaaaagttccagagttgatccatcctggctctgtgtaccagggggtacaaggtacaggtacagatgccctgcatggatcatcctgaaccaatcaccagggtgagagagactgagtgtgctgacttggtgagcccaggatggaataagcctcaccagatgcatctgggctgagagtgggatgggcagatcctcccgcaaaaatcagacaagctattattggagaggaagcagatgccaggaggccaaactgatgtcccctgcaagaaatctgcaggggcccaccccaaggcaacagctgtgggaggactgccccaggattggagcacacagacccaaggaaacttggcccaaatgtgcttttgtcttggaatttcatcttcacagggtatctgtgtgaaggagagacatggcgaggctcaagcttggaagatgtacatgtcattctggaaacacttgtgcatcattatattagtctgttctaacactgctgtaaagaactgcctgagactgggtaatttataaaggaaagaggtttaattgactcacagttccacatggctggggaggcctcaggaaacttacaatcgtggtggaaggggaagcaaacatgtccttcacatggcagcaggagagagaagaataagagctgagtgaagggggaagccccttataaaatcatcagaccttgtgagaactcactcagtatcacaagaatagcatgggggaaaccggccccttgattaaattacctcccaccgagtccctcccacaacatgtggggattatgggaactacaactcaagatgagatttgggtggggacacagccaaaccatatcaatcatgtatgctgagaaaaaccattttcattagcttcccctcgaccttccatgttgctgcaaatgaacccacagttccatctcgaaaattcaactggaactattccctttgttaaataaacttcatttaagggctgactgccttgggccctgggagaaaatgcatctttgcttttgctgagaccaatctaggtcagcaaagcaaaagctttgtattttttagagacatgaactgcagcttagatgaagaccaggggaagcatccactctgaaggtgcaaagtggagaaccgcaagtagtcacagtgggagcaggctccagaggcctcctgccgcctcccttgcccctcagccaggaaagccctttgaaacagagcatcctgcttttgcaagccgcaccagcaatgtcttcagggcagtctcagagtgctccctgctgcctggggcctgaagcagcgctttccaaagtagtttttgcagaggctgctagtttgttcaggagggagaacagacatgggggaattgaggtctctgttctccacccctgtatccttttgctagcaggagacagccatgcagtagccacctccaaaacggtccccagtgacccctgcctcttggtattgtggtcctctcccacaaggagtaggactggctcatgcaacaatagaacattgcagaaattgtggtgtctttggagagtcgttcatgaaaaacactgcagctcctgccttgctagctcttggatcatccactctggagaagccagctgaagatatactcaaaaccatcctcaaatcatggcaaggaacttaggactcctacccacatccctgtgtaggggccatcctgggactggatgctgcacccacagccaagcctacagatgaacaaacctctggctgacatgtggactgcaagttggaaaaccctgaggcaggactactcagttaagccattcccaacttcctgacctgcagaaactgagataggaaatgtccttttaagccactacattttagggtaattggttgtgcagtaataaatggtaacactccacttccagatgcaggcgaacaagtcttgtctcctcattatcccccggtacttgaaagacttgctctcactcactgccctgatctcaccctgctgggcggaagcttcctgaaggcagggaccaggttgtaattaatcattcttcctatgtctatgtccctaatatccccacacactgtaaatgctgcatggacacttactagattcacttgaatttctgtctttctggatgagagaaatcctgggagcacagctgtgcttctttctcccagaaatttccttcctcaactcaagatgagaaatacagctttttaattaacagaaactatctcaacccagatctcaagtcatttgatgtgattcggggactgcttcttgcagagacaacagttacttgcaaaaaaagcccacaagtcaatgcaactgatttcaggaaattgggtccagcaagcagcctccacatccaggagggacctcactgcagcacggatgggcagcacatgtctgctcagccaactcactgtccctgctaagccacaggcttccagccacctgctgatcagcaaggactttacatgtgtcctctacctgcctgccactctgccgaggtgtccaacacagagccccggtccccaagaggctttcattcggctaagcaagatgttcatgcagaaagatcagctacacttaaatctgaattcacccaggattggttagtgtgtcattgactaaatggtcttggagaactgagaaagggatctttgttcagggaaaatataccacaacctcccctcagggcacaggaacctcaaggggttcatggtctaatggggaaagctttccacagagggaatttcaaagggtgtgcagggagtggctggaaaggaagaaaggataatccaagttgttgagtcttcatgaacaaacagcccagagagacagaggtgacaaggagtctgtcatgacccagcatgaagtgtaagatggagtgacgagacataaggttggggcacaagccatggggatgttggtagataattcataagtgtctcacatttctgcatatctcatgagcagaggcactgttggcccttgtggtagactatcttttcaaggctatttatacagtgaacagctttggaagatagagacagatttgcaaagggcaggcacactgacagcccactatttaaaaagtaagggacactaagagttccttgcctggaacgaaacccctacatgggaagtttccctcagccctctgcattgccctggggagttagaactcagagaatcagtacacaaaaatgctggtactctactgcttttgctgtgagaataaagccctttgtttctgacccaggagccttgtgtcttccgtcagcatccatgaaactgtggcagactcacctgtcagcttgcaaaaagggtacaatcacagatctgtctcagctcctgataggagaaccctgaattccaggttttatcctgctggtccttgagtggagaaattacatttgcctttagctgtagaagggtgtcattggcgcctgtaatcccagcctttgggaggctgaggcaggaggctcacttgagggcaggagttcaggtgaaaccccatatctactaaaaatacaaaaattagccaggcgtgatggcaggtgcctataatcccagctactcacgaggctgaggcaggagaattgcttcaacacaggaggaggaggttacagtgagccgagatcacaccattgtactccagcctgggcgacagagtgagactccattggagggacatttgttggattttttctttttttcaaaatgtgcagaaatctgttaaggataaagttaaatttctctgacctttttttctgagcaggaattgagtgaggagtctacaggttagaaagaggagaaacctggtgtgcctaagagaaactagagaaggagagcccgagactcagggcccagggccactgcctggagggcttggccaaacttgcctctcagctatagctgacagcctcctagtctagatcatcaccttcctctgcggacatgggggtctgaacctccctggaaaatgtcttaggaagctcaggaggccacaataaaataccacagacagggggcttaagcaacagaagtttatcttctcacagtcctggaggctggaagttcaagatcagggagccgatggccattgtgtcctccacggcagagagagcaagcacacactttgctgtctctttttttttttttttttttttgagatggagcctcactctgttgcccaggctagagtgcagtggcatgatcttggctcactgcagcctctgcctcctggattcaagtgattctcctgcctcagactcccacgtagctgggactacagatgcctgccaccacgcccagctaatttttgtatttttagtagagacagggtttcaccatgttggccaggctgatctcgaactcctgacctcaagtgatccacctgcctcagcctcccaaagtgctgggattacaggcatgagccatcacactggctctgctgtctcttcttaaaaggacactactctcatcatgagggtcccaccctcatgacctcatctcaacctaatcatctcccaaagaccccatttccaaacaccaccacattaaggactagggcttcaacataggaatttggggaaggggcacatttcagcccatggcgggctgtcctgatgcctaaaagctcccaggacactcacacctactgacttatcccacagccccaagggactccttacgtcctcaagccaaggggaacctccagcaccggcaggctcagcctcctgccgctgggtggggaatggcagcattattgagagtgcatgaaaaatcgcaaggaggcagaagcccacctcacctcttccctcaagcacccagtgcaccctgagggtcaaattggtgacatcatctgaacacattcccttttgagctcatctaaacctaatgtcttacctttttggtcccactacaaataacacctggttattacaacaataatttctgctggaaaatcccctaccctgttgcagtcaaacgggcaattggaaaacgaaaatgttagggtgccctagacccaggagtcatagatattcttccaagacaatcaacatcagacaaatgtggtaaagaggtgagttgtcacgggtacgggatctccccaacttagtgtctgataatctagaagtttcagcaaaaacctgctcctagaaaagctgccagagcaatggccatgctggactagagtccgtgattccagctggacccactgtctgtggcggccactcctcgtctgaagggcattgtcttgggtcaatgcggcaaactccacagcagaggcgttgacacctgagaatcctacagcccagcgagtgaggctgttccgatccactcttcctggccagctgtcaaaacactctgcacctgctctcggaccataacaagtattactcatgaaggtgacagttcctcaggcccacagtaataaagacacacacacacacacacacacacacacacacacacacacacacacaggcatttaaaaaaatgcaataggtcaacaacactcaatctaaaaccctaggggctgggcacggtagctcacgcctctaatcccagcactttgggaggctgaggtgagtggatcacttgaggtcatgagttcaagactagcctggccaacatggctaaaccccgcctctactaaaaatacaaaattagccagacatggtggttcatgcctgtagtcccagctacccaggaggctaaggcatgagaattgcttgaacccaggagggggaggctgcagtgagccgagatcacaccactgcacaccagactggataacaaagcaagactccatctcaaaagtaaataaataagtaaataaatacatacaaataaaaaataaaaccctggaagcctttgccgttggattatttctgcctctctctatatttgatatagtcaatttccatctttcaatttaaagttttctcacagtggtgataaaatattgggtttgggaaagaaaatgcctgctgcaggggaagaaggaggaggctgttctctggagcacaaggagccgaggctgctcaaagttctgctgtgtcatttttcctcctcattgccgcccagtgagcatcaagcatcactggtattaggggataggaacggcttttaaacctctgtcttcagggcccgtctgccaggtgcagtttctggcttcatgtgttgagtaggttggtcaaatcaaatctcctggaccccctccgaggatgtggttgccctgggccctacacagtgatacatcacacagcttcatcccttccaattagcgcccggtacgcgaattgatgtactgagaattaacatcattgatcttcatccaagaatatggccaacaaggcataatttttttctgatcaatgttgctgatcaatgacctaatataaaaaaaggaaaaaaggaagggcatccccaggcatcagggtggattgatgcgcctctatgcatgcagttccaatagacctcagggcctgttctctgctggggattcacattaataacagacagtctttcaagcacaatgagaaacttgtgctccatgcttccaaggaaatcccatgtttctccaagagagaggggaaatcaggcacctcctatggcaaccagcctcggggcagacagaactcagtgcctgccacagctaggtaaggcccggtggcccactttatagaagtggcaggaaccagtgggctccccacgtccaccccctctaggccactgtctttgtgccacagtttattgggatcctctgtgggaggtggaccagggaataataaggaaagaaaacaatttacttctccccagttatatccaaccgaggtaagtcaagctctctgggagtctgtccacggcagaggaaattctagctccaggtttccagtgtgaaggcaaaagggtgaaattgtccacgtgttaccaatctcaagtctccctgctttttatctcctcccagggctcctactgcccccaccccctgcccccagcgcgactccattagtcatgcctcagctgcccagcaagaggctcaccttgtcacactgcagggtttatttattacccacgctgggggtatttgcatttcaaaataaaaccctgcagaaagcaatggctccatctaaaagaatgactctccattgtttgaatgtcaagcactgtggttcactggagcagggcctcccagcttggtacaccgttggggttgggggaccagcatttatgataccctggaatgacactgcttaggaagccacctttttggtgcctttcagttgatttcaggcagtcattcatgcactgtttctcgaacactgtctgtgcatctgcccggcacccacactacggatgcacgatggtgacaggcagcactgtgacaacagcatggcagagtttaccattcctgccgtcccctctgcttttggcctctcctccacaattacttgcttttccttgataaggaggagggaaaattgcaatctagtctcctaacccagatgtcaccaacaaatatcaccagatagtcactaacctcaaaaaatgaggcttaattggtggcaattttgctaagtaacttcagttccttttgtctcagtttctacctttatatggaaaaggacacttgtcacatgaaattcatgagctcatgtctatacctcactgcccagtgttgtattatttactctgcggtatgagtgtctctttccattgtaataacaaggtcactgggcagaaaatcacttcatagagaaaggggtaaaggacacctccaaaagaaaaaaaaaaaaaaaaagacaggagtggaaatcaatccctcaccttcctcaaagcagccctgtctcgtaactgccacaatctagctgtgaatcctgccatctggaagcacccccacaccctccttccgcctcgctgacacaccatcaatttccaaatgtaaccgacaatcccacctcttccccagggtctcgtaatttctctctccttttgccctctatcttatttaaaccacttgactctgtcctgcctattctggaggtgttgatcaaaaaccagttacattgtttatagagaaatgccctcagcttctggatgtctgcagtttctagtcacaacggctgtgattctttgaagtggccagtaaaccagatttttgacaggtgtggagggaaataattcccagactgaggaaagaagctgcaagccgttgtctcattccttgtgttagaatgccatcaagtgacagaccagagaacaccgctgcaaaccttgagcaccttttatgtctaatattccaagacctccctgggagagaaaatatgtaaaccaataaatataaatgccaaaataacccgtcacggtccaaatggccaaattagtattaaaggcagttcttgtccaggtgtcaagaagccttatttatttgtttatttatttatttatttatttagatcaagtctcactctgttgcccaggctggagtgcagtggcacgatctcagctcactgcaacttctgccccccagggtcaagcaattctcatgcctcagtctcccgagtagctggaataacaggcgagcactgccacacccggctaatttttgtatttctagtagaaacagggtttcaccatattggccaggctggtctcgaactcctgacctcaagtgatctgcccgcctcggcctccaaagtgctgggattacaggcgtgagcccctgcacccgctcagagttccttacattcttgaatagaatataagatggtagaaacctaacaatctgagaattataacccaattttcagtattgcaatgctgggtcatgttttaccatttggttcccgatgggaagaagccaggggcaaccctcaaagccaccagtgctccaaaaggaaaggccaacgggggccgccaggtgggtgctaaagctgtatcctccatccagaggctcacggcttctggggatcctcaagaagcctaaagacccaagagaaacaggggaacttcctcaagctcacaaagagagcagctgcaccccagccccggcccctgctgctctgcagataagtgccaggtatgaaatgagggccggtcctcggaattgtgcattgacaggcagggttgaagcctcaggaatgaggtaatggtaaatgcctgcacacacagatttaacatttttcattttttttcccctcttagagacaaggctcactctgtcatccaggctagagtgcagtggcttaatcatagctcaatgcagccccgaactcctgggctcaagcgaccctcccgtctcagccttctgagtggccgggaccacagaactagtgatagcatggagaagatggaaatgacactgtgtccagaccagaaagggggcattctacaagctgacaatctccatgtcccagcacttcagacagctgaagcccctgaagcctcagacagctgagggctcctggcagtgaagcagccttcaggccccagagcacccagagagcttctcccagggtccctctctctctagcaccagtggtacctgggctgcagggaggttggtaggggtccccagggattccttcatgtgataagctagacacggggccccaaagaggcttcagggcttgaggaagataaatatttatcagatcattacaaaggaagagtgtggctgggcaaggtggctcacgcctataatcccaatactttgggaggcccaggcaggcaggtcacttgaagtcaagagtttgagaccagccgggacaacatagtgaagccctatctctactaaaagtacaaaaattagcagagtgtgatggcgcatgcctgtagtcccagctattcgggaggctgaggcagaagaatcgctagatcccaggaggcagaggttgcagtgagctgagatggcatcactgcactccaggctgggtgatggagcaagactgtctcaaaaaaaaaaaaaaagctaaaaacaaaaaacaaaaaacaaaaaaaaaaacataggaagagggtatatggtctggggaagtattctcagtagttacaaaagtgttaagtcggcctgggtgcagtggctgatgcctgtaatcccagcactttgggaggccaaggtgggaggattgcttgaggccaggagttcaagaccagcctggacaacgtagtgagacccccaattttacaaaaatgtttttaattacccaggcgtgatgacatgcacttatggtcccagccactcaggaggctgaggcgggaggattgcttgagcccaggagttcgaggctattgtaagctatgatcaagccactgcactctagcctaggaaacagagcaagaccctgtctctaaggaaaaaaaatttgttaaatcggaacatgcaggtatttaccatcacagggaacattgaaagtattttttagctttgaatttccatgcctctgctgaaaattcctcatctgctcacctgtttgacccatctttccctctaagtttgttaatctatttataatagtattttaaaggcctcgtcttccagttcagcgtctgggtcacctacgcttctgctctagtgactttctttccatgattgtgggtcacagtgtcctgtttctgtgggtgtcgtatacactgttttttatatttcaagctggatgttgtatattaaagaacagcagagactggagaagaccaaagggtctttccatctcccagaaaaggcaccccttttcctttcaggaagctttgctgaggggttgacctctgcacagaatcaggtttaaatagcttcagatcccctctggcttcaaatcattttcgttttttgagacagggtcacactctgttgcccaggctggagtgcagttgcaatcatagctcactgtagccttgaccttgacctcctgggctcaagcagtactcctacctcagcctccagagcaactgggactacaagtgtgtgccaccacgcctggctaattttttattttgttaatttttttgtagagatggagtctcacatgttgcccaggctggtctcaaactcctggcctcaagtgaccctcccacctcagcctccagaagtgctgggattacaaacgtgagccactgctcccagcctggcttcaaatatcttgaaggggaggtgtgtcccctgcccgcagcatggctttgggattcaggcaccacaaagccagatctctgtgcttccctgctgtgccccaattccagtttgggtgattttacatcaggtcctttctctcttactttcccatattttgacctaaacagacttatacgaatataaacacatagcccctaggtctggagtcaatggctgctttcccagagttaagcacaggtcaaaataggtggcaggaggtgctagctacatgcacacactcccatgcagcctgcagtgactttctgcaaacccttcaagtgtctcagcaaacctgagaaatgcagtgaagaagctctcttaggacacagagagccctacgtttatccagacagacactccattagccgaaactatgctttcctcagtgcaatcagctcacagagtaacaccgggccagggagctggaagaaatctatagttgcattttatacatttgggatcaagctagccttaaagagtgacttttggaggctgaaagactagaaaacttggatttcagagactgatatgtgaccagacacacgaagttttaagagtccccgctgtcagaattccaaatggttagtcttaaactgacttagggcgcagcgctgcctctttacaaagagctgatacgctgtcttccggcaagcaccagttctttgattcttgtagacaaagtgcctatcacccagcaggagagggtttgaccagcagaagtgtccagtgttagcgctggcaccttaccgcctatctctgtggcactattaggcctgaggaatgattgagggctgatgtcgctgtgcccaggctctccaccaccaccctcaccagccctcctcgtcaatacacaacgtctggatcaagggcatagcagagccaggggagcatgtaatcttgagcctcagggactgttctgtcctagtgaggacacagataatgatggctaccatctctcaagctgtattacctgtgccaggccctgtttaaacatgcatcatcttgctgagtgctccaggccaccctgggaagaaggtgctgttagcaacccatgttatagacaaggccttcctgtagaaaaagcatacaggcctcatccctctcaaatgtacctgatatagatacccaaaaagcaagaaaaaaactgtgtatatttatatacacacacaaatacacacaaacagatgtgcatacatgtacatatatatactgacttcattgacttggtggattaaaattttcactgacaatgaaggcttccatgttcttattgcaggtttgctggtattcaggatcatgacctttcagcggtaaaaaaaaaaaaaaaaaaaacctactagaggccaggtacggtggctcaggactgtaatcccagcactttgggaggccgaggcgggtggatcacttgaggtcaggagttcaagaccagcctggccaacatagtgaaaccctgtctctactaatagcaaaattatagccgggcgtggtggcaagcacctgtaaccccagctactcaggaggctgaagcagaagaatcccttgaacctgggaggcagaggctgcaatgagccaagatcgcaccactgcactccagcctcggcaacagagtaagactccatctcaaaaaaaaaaaaaaaaaaaaaaaaaaaaaaaaaaactagaaataatgtttttctttaatccgaaagtggaggagaggggatacacaaaaaaatacttctccactatattgtcagaggctattagataaatggtttctgtaaatttagttgtgtttatttacagaagtcctaattttcgtggatacccacttacttaatagttgaggcttaatctttttgagcttacatatgagatttttcttgaatactcagaatagcagcctgaatgtctcagagcaacaatcaaaaggaacctgtacaaatacaacaaagtgtgaattgtagaatcaaaaagcatatgggtgttcactgtttaaatgtttccattattctgtatatttgaagtttttcataataaattgctggaggtcggaggggagtcacctgcaatgattccatcaaacattgacttctcgtggaactttcacaaagccactactgggaaaacacatgtgtatccatgtttgaaagtttatcatttatagctataaaaaagaaaaaaattaaagtcttttcaccaaatgcaatttagaaaagagaaacaaaaggaaaaatctcccataacttcacttacccggttatacaaacttttagtatattcatgtaactattgtgtatatatttggctttattagtttgtaacctttttaaaaattgtatgtaatttgtttaatggctgcatggtaatccatcatgttatagaaatgtgttagcagtggcagagaaccgagttaccccaagtaactggagacgaatccgtacgcgttcgcagcaacttcaatctttgccttgtcaaaagaaagaatttgactgaggggcaaaaagcagaaagagaccaaggcaagtttcagagcaggagtggaagtttattaaaaagctttaggccgggcatgatggctcacacctgtaatcccagcactttgggaggccgaggcgggtggatcacaaggtcaggaattcgagaccagcctgaccaacatggtgaaaccccatctctactaaaaatacaaaaattagctgggtatggtggtgtgtgtctctaatcccagctacttgggaggctgaggcaggagaatcgcttgaacctgggaggtggaggttgcagtgagccaagatcgtgccactgcactccagcctaggagatagagcaagactccgtctcggaaaaaaaaaaaaaaaaaagcaaagcttttgaacagtaaggaaaggaaagaaaaggaaagtattatacaagttggaaggacaagcaggcaacttgagaaaccaagagcgcagcctgaccccttgacttggggttttacacgttggcctacttccaggatctacttccaggatcttacattacttctccccactcctgagatcttacaggaagctgctgatcagtttcaggtgttttctatctgttaggcggctgcctgttccctagcgccagctgtggccaattactttagagaaacagttaacaaccacctgaccatcacctgatggtggcccaacacccctggtgtgtgtagcggggagccttctcctgccctgctcatacctgactacctacctactgtaacaaatgtgccatacctaggaacagtttataaaaacagattactgggacccaccttataaaaacagattattgagacccactggataaaaacgaatctccaggtatgataccaagaaatttgaaatgaaagcttaccctgtgattgtgatcctgtatttggtctgtggatcaagcaaattaagtgtgtgctaactaatcaggtaaattaatgcatttaataatgcattaattagcatacctaattacctaattagcacatagttaatttgcttgatccactatgatcaaatatagcattgtttttaagtttttgctattataaacaaaaatcacaaacatcctcacaggtatctctctgcatacagaaacattttctgagaataatcaagtggtttgtttgctttttattttttttgtttgtttgctttttaaaaaatattttaggctgggcgcagtggctcacccctgtaatctcagcactttgggaggccgaggcgggtggatcatgagatcaggagttcgagaccaacctgaccaacatggtaaaaccctgtctctactaaaaatacaaaaattagctgggcgtggtggtgtgtgcctgtaatctcagctactcaggaggctgaggcaggagaatcacttcaacctaggaggcagaggttgcagtgagccgagatcacaccattgcactccagcctggacaacacagcaagactccgtctcaaaaaaaaaaatattttaatgatgaaggaactatgttgtaattgcaactcaaggacgacccaccccaccaccatcagggaattcgaggggagactggcagttatccagggatcccagaaggagtcaactgggagttaagagtcctaacaaccctagaaaaaaactttcaaagacacaggtcttctcattaatctccataatcacagaggtcttgcctaaaagggccccccttgagtacacagctctgaaactggctaacatcttctgctgtctcatttgattttaaagttcacatttgtgaagggctctattgtacaacatggtgactatagttaataacagtgaatttcagttaataacctgaatttcactgagagtaggtctgaagtgttctcatcacaaaatgagtgtattagcatcgctcatagctcatttagccattacacaatgtatacacatttcaaaccatattgtataccataaatacatacaattcttattggttaattttaaaaataataaaagttctctatcagtcccataaattacaattttcaggcatctgcaaaggcagcatgttttggtttaaatgtggtctttccaaattttatacgtataaaataaatgcataagtgtactacatatgcaaaaactaatacataaattttataaagtcaatgcacgcggggtcactgggatgaaccaatttcagtgcctgcagtctaatgtttaaaatcaaaatggtacaaggtcaccaccaaagaaattgtttaagccaatgtttctcaaactaaaacctttggacatactcccagaatcccctgtaaagaaatgtatactgtactcaaagttgagaaccactgacttagcataaagggaccgtatttcttttctctcccacccagcacaggcccagtgctcagcagaaattggggctccacagttctgcccaacactgggtcactgctgagaagtctgcaccaggccttcctgcacctttccactgagcaatggagtttgtttattcatttatttatttatatggaatttatttatttattttggagacagggtctcactctgtcacccaggctggagtgcagtagcgcaatccaggttcactgcagccctaaactccttgggctcaactgatcctcccacctcagatacccgagtagttgggactacaagcacgcaccaccacgcctggataattttttttaaatgttttgtagagatggggtctcccgatgttgcccaggctggtctcgaactcctgggctcaagagatcctcccgcctgcgcctcccacggtgtgagccacctttgatcttattgctatgatttttttattgataaaaactaataaatattctgagtctcaagaaagctttctgaaactatcaaagggacccaggcggcgcatcactacctgtgaggccgaccccactcacagcacagactgcaagtgaggcttacagatgggaagtgccctaagcgaggttaaacagctagttagcagcagacacggaactagaacctaagcctgctgtcccagcttcggtgcccgtgctcacagcggaagctgcctcggctcatccgtaagggcgctgattagggacgacaaagacctcaccccaccgtccccgtcccatttccgccctcccagatccccaacctccttcgagtcctctccaagtcgcctcgcctcgctccactccaggccttagcaagcattccacatgcctttaccccaaccctactgcctgtcccccaaaagatgcaggcggaaaagaccccaggaagcgagcccactcctccccactgctcagcaacaccgcctacgacgttctcagtagccgaatccctttccaggcgcatgcgcccccgaggtgggcgagcgccggtgatgtcacgcatagcgccatctccgagctccgagagtctgcgacagcagctgccagtgcgtcatcagagagcgccggaagcggtccgagaatgaagagtaagcggggccgcgaagttggagagggttggggacgttaagggtcggggtcttggtactggtgggtgaaatgggtccgggctacctgttgctgcggagtcctaacagaaccgctacaggaatgggcccaccctacctaagaaaaactgagggctggagcacgggttagcctggctcgacctctgagctagggagggatgtcagggctggaggcaggttctcccggaggctgctcagtggtgtgcgatgctagaggagggttccaggccttggctcaacttggccactatctcccggggtgaccgcggtcaagatcctgctcctttctgcgagctggtttcacactcttaacctgatgcaaagcgccgagagctgctggggaatgatatcactaacccaaagctttggtccttaggggtagaagacatgtgccaaggaggggcgtgtagacaccgttaagactgggccttcaatcagaatttttatttttcatctctgccactttctacctatatgatcaagtagattgtctcggcatgtctgagcttcagtttgctcatgcacataagtgtaatgagaaaaaatatgtgtaccttgtaatgaggtttctggcaagtaatggatgttcagtaattgttagatgtgtattgttgcagaaagacttccaagtctgttactaagcacctgtaacagatgaagcaaagttatcaggccccgcaagttgctctctacagtttataatccccatcttccatttgagggagaactagatgctatatataaaacttgcaaccacattggtttgcttgatcaaacaaacatacctggctgggtgtggtgggacacgcctgtggtcccagcactttgggaggctgaggcagggggatcacttgaggccaagagttgaagaccaacttgggcaacaacatagcgagaccctgtctctacaaaaactggaaaaaaaaaaaaagaattagccaggtgtggtggcacacacctgtagtctcagctactcaggagactgaggtgggaggatcacttgaaaccaggaggtcgaagttgcagtgagctatgattgtgccactgcactccagccagggcaacagagcaaaacccagtatcaaaacaaacaaacaaacaacaaaaaaaaaaaacttgtaaccaccttgcatcaaacattctcagggaagtacaagaaagctggaattaaatttacagagtatagtgtaaattacattttctagctatttagctcataaaccaggccttagtagtcccattcttattccattcacacctgtactctgtccccagtgccatggttttcttctttcaaaaaattaagaaacagaagtgtggaatttattttagaggttgaaactttattgaccaatgtatattttgagtttaaaggaaaaacttgtattttatcagttcaggacaccatcgattatgtgacacattataatttcatattaaaatgtgaagaatctttttaaacatcttacagttaacaaaacctatttctaaccatctacatcctagacagctatatcatataacttttaatgagttaccttgttagcaagtgctcaagcttctaacttggggtattttaaaccaatgcaactcaaaatgtgattcactgacctgcagtagtatctgggaatatgttaaacactcaggatctagggtaggagaccaataatctgcattttaataagatcccagagatttttacacacgttaaattttgagaagcattctttttaaaccatgtgcttggaacttctagcatagatgtggccagagggtgggataagaggcatccaagaaagctttgctcttaataccaacctcatcttctcctatctctgaataagcagttgttctgctataagtgtagaagtgtagttattttcttttcttttcttttcttttttttttttttttttttttgagacagagtctcactctgtcacccaggctggagtgcaatggcacgatcttggcgcattgcagcctctgcctcccaggttccagcgattctcctgcctcaatctcccatgtagctgggaatacaagtgcaagccaccatccccggctaatttttgtatttttagtagagacggggtttcaccatgttggccaggccggtcttgaactcctgaccttgggtcaggatccgcccgccttggcctcccaaagtgctaggactacaggtatgagccactgcgcctagtggcgtagttattttcatagttagaaaagtcttgggtcttacagccatacccaacaagaattgatcatttcttttttttaatcccccaggtgtgatctaccatgcattgtctcagaaagaggcgaatgactccgatgtccaggtcagttcttggcagggagtccaggagcaacagaggtgatggcaaagatggctcagtagcttctgagcccccagcactgattgagatgtcctttcccacatcatactcctcatttttctggcagacatctaaggctggatcaaagtctgtagttctcattacctgttcccacgtgccagcctccttttctgttgtgccaaagtcaagtttggtaaaatgaggctttccttaaccttttatcatttcccactgtgttggggacaccaggctgtgcccacgtggtgggcagcatcattcaaccttgtcactgtgccctctgcacttctgcagaaggtgtgcaatcacatatcataagtgaaatttacagattatatctgaatgcctcggcctgctttgtcagttttgcaaaagttcctcttgtggctcataatgagagcattaccttgaaagcaagattttgaaagaccagtatacctttattttgcttctccatgaaagatgagccactcaggtatttaagagaatcagatcattgtcctattatagtcacaatgacgagagtgaattaatttttagttagcatctacaggtgcaaagctgaagcagagttcccaccatcatactgtgagctccctcgaaggctatatgtaccctatcttcccatccccattgctctcccacagaaggaaggctgcgttactattgacagatcagcatcagtctgtcagcctcagtcttagcatttagcacctggctagtgcaaaaagagctcaggaaacagcccagccaggagacaggccctcaggagagagaactgcccaggtctgtggcaggcatgagggcagtggcattgccaccaaatgaggaatccgttattggaactccaacctgagaggtagtgagcttggagggtttctttgtttgtttgtttgtttgtttgtttgtttgagaattgcacacaattacgacagtcatttttcccagaagtcctctctaagagcctgtgctcattcatggtaagttgacgccctgctctcagtgacacccttcagagagagcgagcctggggcctgagatgctctcgacggtaccttcctccaagtgatggtctgcggggcgggagcggaccttttggagagtggccacaccatgcccacagagctggaaacccggttaaggagtattgtcctaagggcacagtgtcagggtccctgcgccctgaggcttggccgaccctggagccctagttttgctgttttctgtagtgttaggatcacttcctccatagcttagtgctactctgagctcactttcatctggtcatgcctggttgaatatatttgttatacatttctcaagctttctcttctgccaaggatgagagaattcttcttcaagatagaaaggttttggtcctttcagaataacctcagaaaagcagggccagagcaggaagtgagcgtttgacacgctgttgtgtgtgacaaacggtcatgaattggtgtgtgagtgtgacttacatctcggcagctgtgggtagcagatgcatggcggatgagcaggttgagagcctcagtaggtaaagggatgggccccatttgctcttgcagtagctgccgggaatggcgggcgggatgcctgggatcctgggctgcccagaccggagcagtgagcgccgcacccccttgtccgcctgcagccttcaggagcacagcgggccgaggccttcgtgagggccttcctgaagcgcagcacgccccgcatgagcccgcaggcccgcgaggaccagctgcagcgcaaggcggtggtcctggagtacttcacccgccacaagcgcaaggagaagaagaagaaagccaaaggcctctctgccaggcaaaggagggagctgcggctctttgacattaaaccagagcagcagaggtaacccgagctccccacgtctttctgcccgcggtgcttacccttcttggtgtgtgaacttggctgagtggctggggaggcagcctggctccacctaagctaagggggcctctctgtcgtctgccacaagagggcagccttcctttaccaatctgggctgtgttcagcgaggcgggtgagacaggactcattgtctggcctctctcctcaccttcaggagtaagacccgtgcaagtacatctgttgcccatggcaacaggctgtttgtccttcggctttgttagacagaaaagaggaactgatatgtttttagtgtgtattactttgtagcttttgatagagccagacagtcacccactcgggtttcattgccaaagcaagatgttgcccacacgtttcagaagtttccaaaaggaatgcatcactgtcctgtcctgtgggaggatgtcttcctccagccgacccgccatccctccttggtgacgggtctgagtgtgggtgtcttggggctgtctgtaggcttttgcttggagatcaacggccaaatagcctcccacgctccagaagacgcttaaagtatgccatgctgttcccggccccactcaggagatcagctgggcctcaggtggagaaggggctgctgcctcccagggtttgcctcccgggtggagcccaggttgggtttgagcttaaggtcctcatttctctaacctaaggctttgtggtaacggattccccacaggatatcaagactggagataatggcccagaagaacgctgttggggtccttgcccctgctccccgcttcttctccccaccacttgcttgcccaccttccagaccagcctgctgcctcacatgaggacctgcgtgacaaccagcaacccctgctttactgggggcttactaggttcaatttcacgtaacagaaaacctcaaaataacagtagcttcaacaagactcacgtttatttctctctcatgaaaagaagtccaggtggacaccgccctgggctggtgtggtcctaccaatgaggaaactgaggttagagaggtgtaggttcttggtctcggttatcagctcaattgctcatcgtcggatttgcacatagttcctaatgatcccaggttgcagttgttggcatcaagtcaagctctgtgctatttggacattgtcatcccaagctcatgttgtctaactttttccctgtttctgactttgctgcagatacagccttttcctccctctccatgaactctggaaacagtacatcagggacctgtgcagtgggctcaagccagacacgtaagttgcattcctgaagctttgctctttggggtggatctcaagcctctgatcattgtaaatgcggcttcaggaaccagcgttggtattgcctggctgcagacggttaaagacctagttgcttcttttggaactttttatcatgatgtaaaccaagggcttctgtttaccctgcaggcagccacagatgattcaggccaagctcttaaaggcagatcttcacggggctattatttcaggtaatttacctaagagcgtgtagcacatggccatccagaggttcactctgtcactctgtggagacccagggcgtgtgttctgttggacacactctttaccgtgtggattccctgagatggcccccagtcaccatcatccccacgctaagggtgggagatgcttctcgctggctgtcttagccagtccggccatttgctggacacaccctaagtggtctctgtgtaccttctccacacagggacccctgttggtaccctaaagggcacagtggctgcgagcactcacccacggcctgggatcttgaacacagaatccctttcatccaatgctgtggtttcaaatgtcagctacacctgacagcccccaaggtgacatctccagcgtaggcctgtcccctgaactccaggctcaggcatccagctgcccacttgacatagccacctggatgttcagggggcatctcagactttacatagccaaagctgccaccgattctcctcacagcaacccctcctggtcttttccatctcagttaattactcagttatttacactggttgttcagaccaaaaacctaaacagtgtctatgtttcttctttcctaatctcctcgaatccttcggaacatcctactacttaaattcagccactgtcattccccagattacctcagacacagctcctcaccgcaccaggcagccagagtgccggttacgtagaaatcagagcacgttccttccctgcttcaagtcttctggcagcgtcccatcgtatgggagtaaacctgcctccttgctgtggtctaaggcctccccgctccctggggcagcaggcctcccacactgccttcctcctgccctgcctcagggcttcgcctctgctccttacctctacccgggagttctcctgtgtgtgcacagtccagcttctcattgttcagccctgctccaatgccactcccctcagggtctaccattgcaaaccatgaccctccacacattgccctgtccctactcttcatagcactcgttgctgtcagaaagtagaatggtgtggttcaccgtgcatcaccctgccttgctagaacccgggctccgtgagagtaggatccaggaccgcctctttccgtgctgtgtccctggcatctcctgaggatggtgcaggcattccacagctgcttggtgactctgtccgctacactgaggctcgggtcaggacgagggaggggctgctgcttgtgatggtggctcatctcgcagtgctggctgctgggcagctctgcagccacactcacgttccagccagcatcctgggcagtgcatggtggtgtttgtgcagatcctgcaagggagacctggctgcatcagagcagccagcccgtgggccctgatggtgctgggcacatatgtgacctttaattccagaatcctgcccaagacccctgtggccacagaccctccgaaggacacctcataggaacagtccagaggctgcaaagccccaggggaagcctggattcttgttggttacatcagggcccagctgttgagcccccaccccctgggtgctctgttctttcatctgctagctcagagggtgggatcagcacccccaacccctgaggcctgcttctctgtggttcccccagcaccacagaggcctgagcctggaactgtcctttttctttgcagtgacaaaatccaaatgcccctcttatgtgggtattacaggaatccttctacaggaaacaaagcacattttcaaaattatcaccaaagaagaccgcctgaaaggtatgtaggtgtttctgagggcattgcttgcgggctgtggctcccagctactgcgttagccttttcctcaaggctccaagagtttgatttgacccctcaagtcagcgcagattgcagatacttgctgaacctgcattaaagcctgcagagaccatcccctgcacccgtggctcccccaagaggtgtgtgtcagtgcagcctgcaaccccggccagaaatggccaaggggaaggaagacctgctcggctgtgcctcaggggacctgggtctgtttaggccccaggagagggcctccacctgccccaaaggctgctgctcccagaggaatgtagccaaacaggcagcagggtagaaacaggagtggcgcctgtccctggagttctgagctgtgtccttggcgataacacttgggttccatccgtggccagcattgctctagcagatactttgggtcagccaggatttctacaccccgccttacccacaaatccagagatatcaaaccatagttagaaggttttgttcctttaatttttcttttttttttttttggagacagtctcactcttccacccaggctggagtgcagtggcacaatctcgactcactgcagcctccactcccggattcaagggattcttctgcctcagcctcccaagtagctgggattacaggcacgcgccaccacgcccggctaatttttgtatttttagtagaggcagggtttcaccatgttggacaggctggtctcaaactcctgaactcaagtaattcacctgcctcagcctcctaaagtgctgggattataggtgtgagccaccgcgcccagccttcttcctttaatttttgagcttggtttttcttgttgcttcccttattttcctacatatccttctacctcacattgtaaacctcggaaagtggtgtaatagtttctccacagagcataaggccaggagcccatctgaaagttaatgtgggaaaaccagtttctggcaggtgttctgggactttctggttctgggaatttggtgtatagcctttgaccctgaagattaggtgccaagctacatttagcatgtgactagattgacctgtggcagaataaccacaggcaaccctaatgcccctccccttgtgggtttcccgtttcctattagcttatttttttcattcaatgtgttctgaataatattctacctaaaagtaaaatattaataaatatttttcctcatctttttttctcctgcctttttttttttttttttcagttatccccaagctaaactgcgtgttcactgtggaaaccgatggctttatttcctacatttacgggagcaaattccagcttcggtcaagtgaacggtctgcgaagaagttcaaagcgaagggaacgattgacctgtgaattctttgccgtctaaggcagttgtttatgacagctgaaaactggacactccctaaatgtccacctttcagtgaagagatagttaagccaattccatttatagaccacctccagccagtgacgctccgagttgaggatgttgaacaacatgggaaggtcgcagcgtactaagtgaagaagtcagaggacagaggaatttctctttctaggagattttcattttgtgtgactcccatggggaggaacagactggcaggaagcacaccggggttaacactggttgacttgaataggattattcgatttttaaaaatacttttccatgttttctgagtgctctatgataaatcagttgcatctgtgataatacagtacatatgtggacataaacagggatcaaataaaggaggtattgctgcagtccagccaggttgaaagggaaggggggtccccaaaggtccattggatggcaggtgtctacagaggctcgcctttgggtggaactctgacccacctaaggtttactttgctatttcaggaaggttgaagaggattgaagggtgagttgctaagtgacttagggtttattcacttcaggaatcatagctggggtggaccccaggagcagagtactgcatgcagctgtgcccatgcatggttgccccagcgtagtgagatgggacctgccgcagcatgcccactcctgagctgccaggctgagccatggaggactgaaaggaggtcgcccggcatcacctcccgaggtgagacctgctgcaaaagccaagccagcagcattgacgccctttgatatcttcgccatttttgctgctgaaagacttggcttttcagtctgaccctggccctctgtgaccatgtgtctgtaaagccagtgggtcaggcccttccatgcagggccagaggaaaagcgggcccagggctgcagtgagagcggggcaggggaccagcctaccagatgggttggaaacatggctcagaaggaccaactaccccttccctttgaggagcaagtctctgccgatcagcaaggcaaggccaggagccctcctggcgaaaggcaggccacaaatctgttctcccccaggagaagtagcagtgccagggctttgcgtttctggtaacttccacccaaaccacaccagagagaaacaccgtagtggagaagggaagtgggagcgctgactgctgtgtgccaggagagtagaaaggcccaggtctgtgccaccacccctccccaaagctcagtgcacccagagtctcacagggaccaacacggtgcctcggtcctgcttccatccatgcaagtgtcctccgctcaccagggtgttctgaggcagctcaagtgctctcccccaagcagcacgcagtcaccgctgccagtgatgaacacacgcacgggctaggcacatggagcccaagcacactgccacctcggacacgggccccggcccagcgactgccttgtggtgtggccgtcctcatctgccacaggaagacagacttcgagggacctcttgcctaaggcctcgctgactcaagggtagattgagatttggacctaataggctccagaactgtgctttgagctacagggtggctgcaggatgagacggatgcagttcaaagtgcaggatgtgctgcctttattacctgctttcccgctgagcaaatccctgtcttgagtgggaagtggcatctattcccccagccatctgaaaatgctgtgttcataaccaaataggtgctgtagcttcctagccatcccgctcttacccgcccctctgcaatgtaaaaggcgtccactgttgtgtaaatacacagttgctttccagaaaagttgtaggtaccacttgccatgtgaaatctgtttttcatttagctcagactcaagtttctgtgtgagtggcggtttaatttgtagatacctctccctctcccccaaggagacatggtgagggtgctcaccggccactaagctgccgctgtgcctgcctgtttctaggatacactgttgccctcatggcccacccaggggtcatatctcccaggtagaggagggaaaggggagggcccagctgggcgggacatggttcctgatgaggaacagctgcagaaagcatgatctgaggcccaggggccgtggcaggggccagggctgccatgtctccacaggctgcggcacagcttgtcatggagggtaatgtggtgctttttggcccgatctctcccatgtccactgtccaaggagcaggaccctggcagagctgaggccttggccatgtggtcccacgggagacagagccacattcgacttgtgtaagcctccatgcaccagagaaagtgccaaagaggagagagtggttagcaactcaggacaggacccagaggctgcaggactgggagacatcagcccagcgacccactgctcaaagagtggggcccaggggccctttacatcttcccagtgcccagctgccacacagggtctgcagaggataggccagagcctcgggggaaaggatgaggttcttggaggagaaaggacagcgaaaggacagcgtgggccatggctgatgtatccatctgctctaatcttcataacaaaatgccacacactggggctgcagcattttctcacagctcttgaggctggaagccaaagatcaaggtgctggcagggctggtttctggagaggcctctcccttcttgtcctcacatggcctttcctccctgtgtgcaaggaaagtgatccctcgggtcttttccttgtagaaggacgccagtcctattggatcaggccgtgttcttatgaactcgtgaaagtctccagacagtcacagtgggggcaagggctttatcatatgaatttggagacccaagtcagtccacagccaccccgaagctttcccagccaggacagcctggttgtgcctcccagaaagactccaacagctacctgactcccaacctcagacactagccaggccttctctttcccccatatgggctgcttggaccactagccagtccagccagccccaatgctggcccctgagctgccatcaccactggattctgtgacatgctcatacaggaacttgggtccagggctgctccctccagtacccggggcccctgagctgcccagttccccttcacttttgcaaacagctgaactcctcctcccgctggggccaggcacagtctggatgggggaggaaatgcgtgtgcaggtgggcaggatgggcagagaagtctccctggagcaggggctccggctctaggcagctgtgggtgtgaagagtgtattcacaccaaggctcagggcaggagcccgcagaagcattgtggaggacccaggaaggcaggggaagcctgcgagggtctgccccctgggctcaggcaggcaggaggagaggccggaaggggtatatggctgccaggagtggagagatggcagagatgctggaaaagccctaatccatggggcaggaggtggagttctgctgatccattcacgcagttctgaagtcttggggaccttggtgccgccatctgtcaagtggggccattagactagacccagcgttcctggaatggcatcctggaacttcccatatcagagttagtgggtgcacattcagagcagccagaccctgggctgcacctcagacctactgaatcagcctctggcggcgggacccagatagctgtgtgtttacctaagaccccagctgatcactgatgtttgaggacgctgggctccagatggtgtctaaagtctcttccagctctgaggtctggactgtgatttcagacttgggactctcaggccaacgttttctggaggctgggaaagatcatcaaatgactgatctcccaggttccaaagagtaaacaggaacatccctccacaaagccgtaaattctggtaaaaaagctcgctttctggacaatggctttagctttaatttagtttgcatttcttagctataatgtctaattaagacatctgttaaatgtctacaatattaatagaaggggttctaatagaactgtattggaattgtccatttaattaacctcgtgagcctttaatggatgtcttaaatagacatcattaacaagagtgctagacaaattaaaattagagtcaataacattcttggtaatttttcctgagctgtaaaggacaagccttgctaactagacaggcgcagagataggctgtgttcacaggagggtgggcgctgctgtcctagagggcatctgaaatggacaggccccaagtgggattcagctattctgtgtcttggtccactttgcccataaaagataacctccagccataggaggcaggtctcaggagcaaagacctgcccttccctatgccttttacagaaaacgtttgctgggccaggcgtggtggctcacgtgagcctataatcccagcactttgggagactgaggcaagaggattgcttgagtctgggagtttgagaccagcctgggcaacatagcaagaccccatgtctacaaaaaaaaatttaaaagttgagctacacatggtggcatatgcctataatcccagctactcaggaggctgaggtgggaagatcacttgagcccaagaggttgaggttgcagtaagccatgattgtgccactgcactccagcctggatgacagatgagaccctatctctaaaaaaaaacaagaaagaaagaaaaagaaaaagtggcctgatccatcagagctcctggaggagggactggcttaggagggagatggaggaggatataggacctcacccagagactcacaaaacgccagatagatgcacagactgggtgaaatgcaacagactgggatagggaaggatttcctgggacaggccgggagcaggatgaaatggaaaacattccattcttttgcctccaccgccccactaagccactctcactcaagtgactgcgtctctccagagccagtggtcggttctccgcctctgccttgcctggcctctcatcggcatttaacaggtcatcccttccttcctcctggaacacctcttatccccacactcccaactttcctcctgcctccctggctactccctctcactgtcctttgggagctcctctgcagaacttctcagtgttagaatgccctgagctctgcctttggacttctttccccattccctccatagctgtctcgtccaccacttcagatccaccagacccacatgtgtaacttggtttaccatctgcctcctgccagctagaacggaagttcctaaggacaggactgttttcctcactgccataccctcactcatccagagtgtatctgactgtattcagtgttctgtgactgttgaggaaatgagaaagctgcccaccaggctccacctggagatctaacaggcagcccagcatggtgggctgcacacagcatgacggacttcccttctcttcccttccttccacccgcgcttctgcggaggcccctcgcctcttggatgctcacacgggaaaccaaggagccatcctgattcctcccttgctttcacgcccccaccaacctttcatcacgacatggtggccctccttgcaaccctcccaccacctgctgctccagcccccttccacccacctgccagcacccagccacagccacagccccccgctggcctccctgcatccacgcctggcctcactgtagcccgggtgacctttgtgaaacatgactcggggtgcctctcccgctgaaaacccacaagcgacttcctgctgcacgcagaatgagagccagcccctgatcggcatcatcaaggcccttccagatcagaccccagcccacccctgccatcgtggtccaccttcccgctgcaccctgtgcctctctacacccccaagcatgcgattgtccccgtgcacatctgtgcctgccattccttcctctcgagctttctcctgacccctcaatctgcaggcagcctccctgcgttcagctctgcacacagggaaggccccatcatcctagctctgcagcccccaccccaaccagtcactctgtcacattactctgtctgatatttccttttcctttttttttgagacagggtctcgctctgtcacccaggctggagtgcagtggtgtgatcatagctcacttcagcctcaacctccctgacttaagcgatcctcgcacctcaacccctcaagtagatgggaccagaggtacatgccaccatgcctggctaatttttgtttgcttgtttttttgaagagctgggggtcttgctgtgttgcccaggctggtctcaaactcctggccttaagcaatcctcctgcctcagcctcccgaagcgctagaattacaagcgcgagccactgcatccagcagtcttatgttttgtgtaccacttctcagtccccagtgcaaccatatctgcctgtttcatatcattttcttccactggaatgtgagctgctcggacgctgggacactgcccatggtgttcgccgccataaccattgtaagccccctgcaggggagaacactgccttgcatataataagtgctcagtaaatatttgttttctgacccaaaaagaaaaaatgagcccaggatgtgcctctaataatgttgaataagggttggcacacagcaactgcaagtggtgctggtcagtgacccctgtctgggccagatgagcccgtgtggcttgcccagggcagggcagctgcacatcctgagtccaacgtgccacccccccttccttgtcggtgggcacccctggtagcaggagccgcgggtgagaaggcagccctgtgccactgggccctggcaccccagctatgcagaccgaggaggttatgctccatcaacagctgtgacgtgcagcaagtgtggcccgcgcttctctgcccctttcagtttcccccatgaagccccagggtctggcgggagcagctatggctggcgctgcatagcctggcctggagaggctgagcccagcaggaaacccgagtcaggaaacccaagttcaaggcccaagttccccgagaccttcggttccaaccacagagaacgtgaagaaagggagtgtggtgtttattgcaggcacatttaatctacacaaattaaactgtatcctctaccaaaagagagggagggaggggaggaaagagaaaggacgctgtagagagtgctgccagtggctctgtcctgcctgtagagtgctgccagtggaggctcgccttgcagcgaatgtgagacggaaagcatcctcagttgccctgctctcccaaaaaagtgtgcgattataatgctttgtataaaaaaacacaggccccaaacaggtgctgtgccacaggggcttgtgctggctcatgagagctgatgtgtgcacctcctgcagacggcacattcatgccggcaccctgcaaccctcatggtgggaacatttacacagcaatttacactatgctacaaaccagggcttgttacacatgtaccagcatcccatcactgccctaaatgcaagctggctgctctgtgtgcagaacaggctgtgttaagtcatctttagggggctacctagccccatggaagatggggctccgtggcctgggagctggagacagagcgcttgctggctaaggcaggggagattgcaaacagaggatgtgtgttttctcagggcatatgttatacttcaatttaaaatgtttgtagaagaaccatttggactattatgtgggtgcttaataaatatctgaaatcatttgagcatctctccagcagtctcatttcttaatggtaatgccaggccaggcatgatggctcatgtctgtaatctcagcactttgggaggccgaggcgggtggatcacttgaggttaggagttcaaggctagcctggccaacatggtgaaacccggtctctactaaaaatacaaaaacaagctgggcgtggtggcaggcacctgtaatcccagctactcaagaggctgaggcaggaggattgcttgaacccaggaggcggaggttgcagtgagctgagatagcaccattgcactccagcatgggggacagatcgagactctgtctcaaaaaaaataaaaatggtaatgcccaggttaccctaagtggctcttgcttgaaaaatcacagatttaaagcaaggaaacccacattcctaagaaatgcagtatgtcaccaaactcacaattttaacagctccctcctttcaaaatacgggctcttccgctaccccagaactccagggaccaagtgctctgcagccctgtcactagggcgtggttgccacagccctcctggtcccgccctgtgaggtttccaattgagtagtgagagagtgagtggtgatgacaggaccctggggccacagggtgcggtgggaggggaacagggcctgtggcagaggcccctggcaggtctgaaagtaggctggcttccctcaggacctgaacttaagacaagccggagggctgagctggagtcaggcaggctgaggcctcctgcagaggagctggggtaggaagtggggcctgcaggggcatggcgctgaggaggctggaggcttcaggcaccaggcagggcagcaggaagtgaggaagactggcagtgaactggagaggccaagggccggaagaccagctaggaggttgtggccggtgctagacgtctgcagcttaaccagggtgtcggccttggggatgcacggaaacaggtttgagaggtgcacacagcacccacgaacagggcctcagggacacagcccctccagcctcggtctgggtgtctactcacagcccagtgccctgaagggtggcagccccactaggcgagtggagatggctccagccgtccaagctgctgaacaaggggctgtggacaaggccagcgtggccaaggaggcaggggctgcagctgaggtcttctcaggggaaaagggagcaggcaggtggggagacacccttgggcagacagaaataaggaggaagatggcagagctgggtcgcaggggtggggagccgtgtgggcatacctccgggtgttgggcaggctgcagccttgtctggcttagctttgtgagttcagtcaagggtgagcctccacccatgccttggcgtcctcatctgtaaaatgagcatcaggaataaagcacagccaataaagtttgtgtgtgtggtatcacccaaaaactcagagggttctgacagaatacagtaccatcttccaaacataggggtcgggcattctcccaaactgtccccttgggccaggtgtggtgccttatgcctttaatcccagcactttggaaggctgaggcaggaggatcacttaagcctgggaggttgaggctgtagtgagctgtgattgcaccactgcactccagcctgggtgacagagcaagaccctgtctctgaaaaaaaaaaaaaaagaaaacccacccacctgtcccctccatggctgcattctcagtaggaccccagaatacccccaggtagtcagcactggtggctggctgaggacactgagatgaattatccccggatcacatggccagtgggtgagtcacatggcaagtcccctctcaccaaatcagctattcttccagaacttgaggaagacttcctttcaccataaatgtaaagccccgttgcctgccagggtgggaacaggactattttttgcatggcatgaacccctgccagctcctgcctcctggcggtgcttgccgcagaatttacagaataaaataactattgaacaccctattatccggctgcctaattaatgtaaatgatagttatggtccccacaccgtggcatatgtttctcggaggaggccctgccagccgcctgggccccattccaggggtttttatggtagcagccccattctggctccattgagtaaaaggtaagttgtggccctaaataatgaagacagaagagctaatgggctcggtgaagaagggcagctcaggcgctggtctccgaatcaggtgacagaccctgcactaatgtggcaggccaggtctcactaacgcaggcctctgtaacacctgtttcagcattgactgagtggcgaagttaaatattaaaagctgatagagccagtgccctatacaaaggctggagtgtaacaaaagcccaccaggagttttgcccaggcctttcctgggccttgaagcatgacaaagtaacaaaggaattaacaggacccattttaagattaaacaagttgtatcggaggcctgaagaaactccccagacctccacaaacaagtttactggggatctgaaggaactccccaaacctccataatttagcaggagacaaaataagggtaatcgccccagcacctggacccatttagattaagtaaatttactgaggcttcagaggaagatcttcaggactcagatcttagttctagattaaaagaagttgggctgggcgcggtggctcacgcctctaatcccagcactttgggaggccgaggtgggtggatcacgaggtcaagagttcgaaaccagcctggccaacatggtaaaactccgtctctcctaagaatacaaaaattagctggtgtggtggcgtgcgcctgtaatcccaactactcaggaggctgaggcaggagaatcacttgaacccgggaggcggaggttgcagtgagctgagattgcaccactgcactccagcctgggtaacagagcaagactccgtctcaaaaaataaataaataagttaatcacttatgtctttagatgaatgtacacttacacataaacatatagcttagaaggtatataaactctgaaacccgaattttgagttggtctggtgacatttcctaggccttcttccccataactggttacagaaataaaaactcccttcctccccagttcatctgcatctcgttactgggccgtgagaaatagcagcccaaccctcaatttggcctggaaacgctaatagacggggtctttccttgcagacccgagtgctccacggacccccggtgcaacagtccctaggactctggaacagagacacagaggaggtgtttctcccagagcgctatacacagaataaaatcctatgaggcccatgtggcctggcccctgccctcctccagcctcacctcatgccaggcagctgcctcctctcctctggctcccagcgagtggcccatcctggccagtcttgccctggccttccctagttttagcacaaaccagagcagctggtcaccctactccagccccaccagctaggcttggtctcagggcatgggcccaggatggtcttccccattctatgtgtcttagtgcactggggctgttataacaaaaataccaaagactagatgatggataaagaatagaaatttattattcacagtcctggaagctgggaagtccaagatcaaggttctggcagatttggtgtctatcaagggctccttcctcatagacacgtctcttctcactgtgtccccactgggtgtggcacactgggtgtggcagaagggataagagagctctcggccgagcgtggtggctcacgtctataattccaacactttgggaggctgaggcgggtggatcacctgaggtcaggagttcgagaccagccaggccaacatgatgaaaccctatctctactaaaaatacaaaaattagccgggagtggtgggtgtgcctgcggtctcagctacttaggaagctgaggcaggagaattgcttaaacctgggaggcagaggtttcagtgagccaagattgccccatttcactccagcctaggtgacaagagcaaaactccatctaaaaataaataaataaaataaaataaagagagctctctgtggccacattttttttttttttttgagacagagtctcactctgttgcccaggctagagtacagagatgcaatcttggctcactgcaacctctgcttcctgggttcctgggttcaagcgattcttgtgcctcagcctcccgaatagctgggattatgggcatgcaccaccacacctagctaatttcggtattttctgtggtgatggggtttcgccatgttgcccaggctgctctcaaactcctgacctcaagtgatccgcccacctcggcctcccaaagtgttgagattacaggtgtgagccactgctcccggtctggcctcttttatagggcgttaatccctataaacactccatcctcaggacctaatcccatcccacagcccccgcctcttaacagcctcacattgggcatttggttcaatatatgaattggtggtggacacaaaatattaagtcgatagcagactgttagctcctcagggggcagaccgatgttttaggccttcccagaccaccctaagtccaccagtcaccatctccacagtgctggagagagaagctgactctgcatggctggtctgcttccgtcctgtgggaggaggctgggccctgcgttggccgcccaccccagccctccctctgtcacagtagcacttgcaggaagaggtggggctggcctttcttagaaagagcctgtgtccaaggccaggcacagtggctcacgcctgtaatcccagcactttgggaggccgaggtgggcggatcacctgaggtcaggagttcaaggccagcctggccaacatggcaaaacaccatctctactaaaaatacaaaaagaagccaggcctggtggtgggcacctgtaatcccagctactcgggaggttaaggcaggagaatcacttgaacccaggaggtggaggttgcagtaagctgggactgtgccactgcactctagcctgagacagagtgtccctctagacagagggagactccatctcaaaaaaaataaaaatgaaaataaagccaacaaaaaagaaataacctatgttcaactcggtgctgctcaatcctggctacctgttacaatcacctagggagttttaagaacaccaaagcccagacttcacctcccaaagttaatccagaatccctggggtggggccttgccatcagtatatacatatatagacagagagagggacagggtctcactctgtcacccaggctggagtgcagtggcgtgatctcggctcactgcaacctaatcttcccgggttcaagcgattctcgtgcctcagcctcccaaatagctgggattacaggcatgtgccactacacccagctagtttttgtatttttagtagagacggggtttcgtcatgttgcccaggctggtctcaaactcctgacctcaggtgacctgcctgcctcagcctcccaaagcgctgggattacaggtgtgagccaccgtgcctggccagcatcatatattatcggtgtatttttaatctacgtggcctagggcaagtcacctctgggagccagagcttccttgctgtagaatgaggagtatccaccctgtgctgtgggagtaatgggggccgggcacagggtaaacacgtgccatttgctgtcctggtgctttctgttgttgaatggacagttcagaacctccagaaatcaccctgagaatctcaggctttgtaacagcagtgtctcacccaggtctccgaggtgaccacggccactcacagggctgcaggctaggccaggtgcccctccaccaaggacccagacaccaggagcctggatttgccaccactttctatgctgtgttataaacacaaacatgtgtctgcctccttgactataagctctgatgaattcgcccctgagtcccaggctcagcgcaaaggccagctcgatgcaggggctcggagaatgagtaagtgaatcagtgaatgtgcccgcagctggtgtgatcaggaacttttgggtcatttcagggccgtctctggggcaggatggtgcttctgagaagggtccctggaccaacccacccaggagccatcacaggccaggtttctgtcccagcatgccttgcagggtgtgcctcggactcacatttccatagaaatgaaaagtaaaataccaaagtgcatcgcacatgtgtcaggtcgcttctatttcctcacattttattttaattatatgtgaaaaatggaggtcttggccaggcgcggtggatcatgcctgtaatcccagcactttgggaggccaaactggatggatcggctgaggccaggagttcaagaccagcctggccaacatggtgaaaccccatcacttctaaatgtacaaaaattagccaggctaattttacaggaacttgtaatcccagctactcgggaggccgaggcagaagaattgcttgaacctgggaggtggaggttgcagtgagctgagatcatgccattgcactccagcctgggtgacaagagcaagactccatttcaaaaaaaaaaaaaagaaaaagaaaaaagaaaaatgaaggtctctagacagcaaggggactgcactggtctattccaggaagctctgcaacagcaccaggcctgagggacagtgacaggtagataaatagaaaaatgctgcttaggagcagggttgcaagcccacaggatcagattgtcaagtttggagctgaactccagcctaggggtattttttgttttttcattttcttttgagacagggcctggctctgttgctcaacctggagcgcagtgacccaatcatggctcactgcagcctcaaactcctgggctcaagcaatccaccctcctcagtctcccaagtagctgggactacaggcacacctggaaaattattttatttttgttaaagaggaggtctctgttgtgcaggctgttctcaaacccctgggttcaagcgatccttccacctttgtttcccaaagcgctgggtttacaggtgtgagtcactgtggctggccccagcccaggttttcctactccactgccttgtacctggctcacccccctctatagaagcccatgatctcttctggttcaggagcaccatggtggtgtgtggcttctctacactgtggtcccatgtggacacgtctcagagctgccactccaggagacactgactttggcctgtggccatcgagtgcatctgttggaaggattttgtttgcaagtgacatagaaccgaatgtaaactggctaaacaaaaagggaattcaatgaaccccgtaattgaagggtcagaatagaaagtgctaccttcaggaatggtttgatccagaggatgaaacagcattccaagactgcttatttctctccatatctggctctgtgttgcctccttgctcagcaggttctctcttcatagtggcaagatggtagccccagcctcacattctctcaggctagctgacagctggctggggaaaagagaaatgttttctcccggtagcccttcctccagtgtcagaatttcttcatgctggttggatctttatgatcagttccgcattcctgcactgctgctggagccccagggcactgattggccacatctgcatcataggcttctgttctggaaacagagttctggaaagtgagtgtcaggaaggaggctgttcctctaaaggaaatcaaggtactttttttttttttgaggtggggtctcactctgtttcccaggctggagtgcaatggcgtcatcttggcttgctgcaacctccgcctcacaggttcaagcaatcctcatgcctcagcctcccaagtagctggaactacaggtgtgcaccaccatgcctggctaatttttttgtattttcagtagagatggggtttcaccacgttggccaggctggtctcgaactcctagcctcaagtgatccatccacctcagcctcccaaagtgctgggattacaggtgtgagccactgcaccgagccaaggtgctattttttaaaaggagggagctggatgctgggtggcaataataataataatgtatccattcctctgagctcctgaagtaacaggtgcagcctaatgaggggtccttggggaggattggtattgtgtggacccacatgagctgcagctgcatttcccagcatgtccttccctatgcagttcccagttcgcatgggttgggccacaagagacattccctgagatttgggaggcggaagtgacgcagcagccatcttctcagcattctggaggtccaaggcctccctggtactctgggagactgcataaaacacccattccatgatcccatctgaggtgaaggagttggggtattgatccaccagtgccacttggtaggggccatcccagaaggtgttaatcccctggcatttcctgatgaccatgaggtaggcacagttgcacactggagctttgcagaatgccctcaggtaaaaagatgcagaaactttaatttgcaggctatgggcagggcaccagcagtgcctcctacagagcactgattaagtcactactgagtgctctacaggtaaccccttcaaatcttagcaacagcttcaagaggcaattaggaacatccagattcacccgtgagcctcaggagcttgtccccccctgggaagatggaacagtagggatttgaacccaggatgtctgagccactgctttccccaacaaaactacacaaattcagtggggtcattccaggccaccaccaggccctgctaactcctcaaagaagaaaagccaggctgggcgcagtggctcacacctgtaatcccagcactttgggaggccgaggtgggtggatcgcctgaggtcaggagtttgagagcagcctggccaatatggtgaaatcccatctctactaaaaatacaaaaattacctgggcctggtggtgggcacctgtaatcccagctactcaggaggctgagacaggagaatttcttgaacctgggaggcggaagttgcagtgagctgagatcacgccactgcactccagcctgtgcaacagagcgagactccatcttaaaaaaaaaaaaagaagaagaagaagaagaaaagccgagagacccctggaccacctgcctttctgtggtcaccctctgggagtccctgctccggtaccctttgggtgcccaccgtgatcaacagtcaagtcctccccttctgcgacagtggctttttgcagtctcttctctggaatgtttttctgcagatactaatgaatgacccttcaatttcccaggaagggctgcctttttttgaagtggtttaagatctctgctcttgattgcaatcttccaagagctgattttggccacttggctctcatttctgaagtgatgatggggatgagaggggaggaaagcaagtggaagaaaagtgtgtgggctcagctagtctataggaattgtaatcccaggagacaattgagaattctaaaaatagagaaaagaactgttttcttttcagctctgtgaacaagttatccctggtttgtaccccaatatcagccacactcatcttgcacaaatcatgacttctcatgtaaaggtttgctactttttcccagtggtttttcataatttcaaacaaaattatttctagaagactcatcacttatttttaatattaaagtctgtaggatggccgagcgtggtagttcacacctgtaatcccagcactttgggaggccaaggcaggcagatcatttgaagccaggagttcaagaccagcatggccaacatgacaaaacccatctctactaaaaataaaaactaaaaaaatcagccaagcgtggtggcacgcacctataatcccaggtacttgggaggctgaggcacgaaaactgcttgaacctgggaggtggaggttgcagtgagctgagattgtgccactatactccagcctgggcaacagagtgaggctttgtctcaaaaaaaagaaaagaagaagaaaaaacgctatgggaagctggctatggtgtgcacctgtggtccccactactcaggaggctgaggtgggaggattgcttgagcccaggagttccaggctgaagttagccatgactgtgccactgcactccagcctggatgacagaatgagaccctatctctaaaaaaaaaaaaaaaatttaagtctattagaaaatgtgacttgagttggacaatttcatagcacatgtaatttttaagaagtccttgcttctaaatagcatatacctagataaaggcataattgaaaagtggaaaataaaagaatatatcagccaaaaatctcactgtgtatttctagtttgacttaaaaaatgtattatccaacataaaagttaagaacttaaaaattaaaaactttttttttatcaaaacactgccttaagtgagagaaaagtcaagccatagagtgggacaagatatttacaatatacatatccaacaatcaattcatatccagaatctattttttaaagtcttacaaatcaataaggaaaaagcagataagtcaatggaaaaatgagcaaaaagatgcaaatggacaataaacgtaggaagagaagctcaacctcatttgtcattaaagaaattctatttaatcacctgtcaagtcaactcaaaaaaataaaaaagaaaaaaaattataaccaaaaccacattacattattataaacccacaaaaacagctaaaacgaaaaggaaaaacaatgcaagggctagcaagaatttggagcaactgaaagcctcataccctgtgggtggactggcaaattggtacaaccactttggaaaactatagcagtatctatgagagcaaagacatgcattacctctggcccagcaattctgctctcagatatttacccatcagaaacaggtccctatgttcacccaaagacatgggccagaatgttcctagagcattattagtcgtgtcccatgtaaagtgcctggatgttcagcctggacatatagacaaatggagtgtagttcatttatgaatggaaattgataatggaatattcacaaacagaaatccatacagccatgtgaatgaacaagctattgcctcaccaacaatgtggacagttctcacaaacacagcatggacagaaagaagacagacacacaaaaatacacactcaatggtcccatacacataaagttcaaaaatgcgtggcatggtaaagggaggcagagagtggtaatccccagggagctgatgctggggagagtgcctgagggaggcctcctgggcgggtcagaaggctctgcttcttcctctgtgcatggatctatgcacattttaaagataaataaatacaaaaccgtactgcctttaaggcctcttctgctaacctggaaagcccagctgggttagtccggggggggtgcaagaaaagaagccctaacttgcaattcagagccaggaatcacacttatggccaccctgtgtctgaccttaatgagagaggctgtggctttaggtccttagcagctcatctcaggaaagagaacttgttgtcctgtgtcccagctatcttgtcacacctgggctctcacgcagctcctgctccagctcagtttgttccctaggtcagagctttggtgactgtcacccaggcccctgtccaagttctggcctcatggcactaatcccccacgtagccagtggctagctgtgcaacctagagccagttagaaatgtggcttaaggtgatctgaatccttccagaacattagccctgccccctgtggagtccctgagaagagaaatgccccacgagtgacaaagaaggcaaagtatctcctcactgtgtgctggagtcaggccccaggccctggcacagagagctctgatccaccaagccagaagacctagggcccagtggaggccagggcaagtgcctgcctggggtgtgagtgtcttccacaccatgcaggattcccttcaggtcctggggaactgtcaacagagcggaggagctcctattcacccacagacacacacacaccccgtaacacacacacaagtgcacacccatacacatctgcaggcatagatacaggtctgctcatacacacatgcacacacgtacacgaatatcctttacactagacacacatgtgctcacagacacccttgcaatggtgtgcatgcacacacgcatgcacttagagatgcacacacactcacgtagcacttgccagacactattctgagcactttccatatattaactaatttaatccttataaccactccatgaggtccagatatcaatcccactttgcagataagaaaattgaggcccagagaggttaagtcacttgttcagagtaatgcatttgaagcctggcagcttggccttagagtatgtaccttttttttctttttttcttttgagtctcgctctgtcgcccaggctagagtgcagtggcgccatctcagctcattgcaagctccaactcccaggttcagattctcccacctcagactcctgagtagctggaactatgggagcccaccaacacgccctgctaatttttgtatttttagtagaggcaaagtttcaccatgcttgccaggtgaaactcctgacctcaagtgatccacctgcctcggcctcccaaactgctcggattacaggcatgagccactcatacctggctgagtatgtggttttctatgcgaatctccattcacagacaaatgcacaaagacacttgggcctttggacacacacactcccacatgcatgtacacacatgcacagacacatgtgcacacttgcgatcaaccctcccacacatataagcacacacacttctttctgctgcctcccccctcacttcctggcctctctgcctcccactgactcctggtagaaggagtgagagcccctctccccccggccttgccaggcagctgggactcctggctccttgtctgaaacaaacccagggccagcactgtcttcctcgtgccctgcaagtgggagggaagccccagctcatccagctctgttggctactctggttccctcatcaccttgtgagacaaataagacctgttctccgtgttcaatggggaaactgaggcccggaaggaaaaacgagtggcccaaagtcaccctgagtcatggcagggctgggctgtgggtatgcaggcccctggtcccaggccaggctctcctagggctcagacgatacctttgaagagccaagcaggggtgggtgcagcccagagaagtgggcctccctctgactctctggccttaggcactaaagccttccccaggagcccagaaagataagtgcctttctacctggcaaggccccagtgggagtggtggcattctgaaggggctgtcacaactctcagcagtcatgctaaagccccaggtcaggggctgagggatgacttcctgcctgacgtgcccctctgccacatccctccctctctaagagttccccagggtctggccccacgggaagactttctatttcacaccagcctaaccccaagtggcacagcggccggcacagcgactggggccatacatctcagcttccactcctgagttctggacttctcccacaccctttgtgtggctggaggttttatgagaaggccaaaaaagaaaaaagaaaaaaatgaaaaacaaaaaaaaataaattacttgggaatttgtttttaattaagcaataagcctcgatggggcttggctgctgcctcataaaactgctcccggggtgtggggaggcatttggtccagatgagtgcctcaaatcagcccggaatgtgatgagatgattactccccggagttcgtacaagatgagcttctccagtgctgtcttattgctattataaaaagtctgcaggcagtgggggagaaaagctgtggtgctgcttggagaagaagaaaacaccaatgctggctgtcagggccagagctcagccccccacccttccttcaccacatctgctcacatggcggaacccatgggtggcccacaatggaatggaggctgacatccttaacaaaaaatgggtccccgtacacagcgaatgggatgtttcagcagagacacaaacaagaaggatgcgagggacccttacttggagatattttctcctgtcctgccaggagcaagcaaccacgctcactcccagggcagctcaattcatctcactaatgctacaacctacaagcatgcatggctaggaattctgaggcttctctctctctctctctctccccccgtcctgcccccagtcagcttaccaggggaaggaatttttgctttctgggtcatgcgctggcctagccttcactgtgctaggtctggataataaatgaaggaaaaagaaaacccaagacactagagaggtgaaattgacctacgtaataaaacggctgagatggaacaagatgagaaggtaaggaaatggtaagccgccctggctgagcactggggagaatttgggaaactgggagacaagaatggcgaagaaaaggagtctcgaagatccgtcaccatcagctaggaggatggaacaagcagatggagaggaaggagttttaaacatttgctgagccttaagaatatatgttttcttgtggcatttcttcaagaaacagagtacagacttataaatactttcaattattttgtgatgtagatcgatccttctctgactatgatacacacagggactaggctatttgagaccctggttatatttgaattaaattagcaagcatgggccgggcccggtggctcacgcctgtaatcccaaccctttgggaggccgaggcggggggatcacctgaggttgggagtttgagaccagcctgaccaacatggagaaaccccgtctctactaaaaatacaacattagccgggcatggtggcacatgcctgtaatcccaggtactagggagcctgaggcaggagaatcacttgaacccaggaggtggaggttgtggtgagccgagagagatcacaccactgcactccagcctgggcaacaagagcaaaactctgtctcaaaaagaaaaaatctagcaagcataaagacaggagtaggaagatttagggaatgcaggagggtaagggggtaagggatagaaacccctatgaaaagctaagggccgggcgcagtggctcatgtctataatcccagataatctggaagcggaagcggaaggatcacttgaagccaggagttcaagaccagcctgggcaacatagcaagacccctgtctctacaaaaaatatcagttatccaggtgtgatggcacacacctgtggtcccagctacttgggagcctgaggcaggaggattgcttgagttcgaggctgcagtgaactatgattgcgccactgcactccagcctggcaacagagcaagactctgtctctctaaaaaaaaaaaaaaaaaagaatttgagatgatgtccagacaaagacagaacatgaatgaatgaccatataggaacttgccagagagaagcagacgtgccccaggtaaggtgaggcctggttcatgcacatgaacagcccagggcaagtgctctagagtcagacagcccagatgcgagtgtcagctctgccacttgggaaagtccttaaaactcttctcatctgcgaagagatcaaccatgagattggtcatagaactaacttcaccgggatgttgtaaggcttgagtgcactgtctatggaagcacttagcacactgcctagcacatcgcaaatgcccggtaagtgactggtattgctacttgagtggaaaaaacacaaactatttttcctctgctctcccccacgataatcaacacagaagactgaccaaatatgagggggttttccccgcacacccagaaagcaatcggtcctgcagcggacgctaacagggtgtcctttacttcaattctgacaccatctacctggagatcccacaggtgaggggtccatccccaacactgcctccacttctggggccaattgcaaactccagttattcttcctgtgctgctgccctgctgactataaatcggggttcccacaaccccttcctggggttcaattaatttgccagagcagctcacagaacccagggaaacacattcaccagtttatcacacaggctattgtaaaagaataaacagccagatgaaggggtatgtacagccaggctgggaagggtccccaagcacaggagcttctgttcccgtggagttgggagcaccaccctcccagctcatgaatgcacagtattaatgaatatatagaatatcagctttcaattaagctgacttctgcccgtagagctctttaaaaaaaaaaaaacttttcagagctcaggcacagtggctcatgcctgtaatcccagcactttgggaggctgaggcaggtggatcacttgaggtcaggagttccagaccagcctggccaacacgatgaagcctcgtcactactgaaaatacaaaaattagctgggcggggtggtgggcacctgtaatcccagctactcgggaggctgaggcaggagaatagcttgaatccgggaggcggaggttgcggtgagccgaggtggcgcctttgctctccagcctgggccacagacagagcgagagtctgtctcaaaaacaacaacaacaaaacaaacaaacaaaaacgtttcaggtcaggcacggtggctcacttctgtaatcccagtgttagtagtggaagttatccgtgttccccaaaatatgttaccggcggcgaatccgtacgggtctgcagcagcctcaattcttgcctccccagcagaaagaattcgaatgaggggcggaaggcagaagaaaagaccaaagcaagtttcagagcaggagtggaagtttattagagcaggaacaaaagtaaagaaagtacacttggaagaggcccaagcaggcgacttgaaggacaagtgcggggtttcaccttttgacttggggtcttacacgtcggcatacctgtggggtcttacagcacttctcccctgatgttgccggtgggttgggctgtccacaggcaccgtggcctgctagcgcttgggagaggagcatgcgcagtgtgtttactggagttgtacgcatgctcacttgaggcgttctccccataatctagccttcctaggcgaaggccatagaccagttaaacaccaccattttgcctcttaatgtgcgtgattgagcccagctgcccaactcctgagattttttttttttttttttttaatgatgggggatttccaatccgccgtgctgactcttttttctttctttctttcttttttttttaagaacggagtctctcactgtcgcccaggctggagtgcagtggcgtgatctcggctcactgcaacctcgacctcccggcttcaagcgattctcttgcctcagcctcccgagtagctgggactacaggcacatgccagcacgcctggctatttttttgtatttttagtagagatgggtttcaccgtgttagtcaggttggtcttgatatcctgacctcgtgatctgcccacctcccaaggtgctgggattacaggcgtgagccactgcgcccggccccaacttctgggatcttatcgagaagctgctgatgaccagcttcaggttttttctatctatagggagaccgcctttccctggcactggctgcgaccaattattattttagagagacagtgtaacaactgcctgaccatcacctgatgatcgcctgacattcctggtggggtggggtcctcttttgccctgccatccactgtaacacccagcactgtgggaggccaaggtgggaggatcacttgagcccaggagttcaagacgagcctggacaagaaggtgagacctccatctcttaaataaagaaagaaagaaaacttttcaaatttctaattatcagtttttacccaagacaaattcctggctttttcacttttttaccaaaggtaccctcctacttcacaagatccagaaccaccccaaaagacatctcaaagaaaagaaacggctggggacagtggctaatgcctgaaatcccagcactttgggaggccgaggtgggaggactgcttgagcccaggagttcgagaccagcctgagcaatatagggagacctcatctctacaaaaaaaaaaaattaaaattagctgagcgtggtggtgtacacctttggtcccagcgacttgggaggctgaggtgggaggatcacttaagcccaagaggtggaggctgcagtgagccatgagtctgccattacaatccatactgggcaacagagcaagacgctgtcagaaaaggaagaaagagaagcagaagaggaggaggaggaggagaaaagaagaaggaggtgaaggaggaggaaagaagaaaaagaggaagaagaggaagaggaggaagcagaagaagtggaagaagaagatggaggaggagaaagaggaggagaaggagaaggaggggaaagaaaggagagttttggtagctgttagggtctcagcttctcagctaaccatctacacacaaaggctctaaagtcccgtatctccccacagacaggaaatcaaaagctatctgtggaaaaggatcaataacaaatggatacccccaaagtcaaaggtcatacaaatgtcaaactaaaagggactgattccctaactggaaagcaaatccaggccatggcagagggagcatggaattttagctaaactacaaggtggagcagccttcactgtgagtcccacaggggacccaccgtgggtggtttagcagacaaaggattgtaactttgttttaagtgagatttttactctttaattgagctgagagagttgctaaggctagccgtgacactatattcttcctttcatttaatcttcccataaatacaaataaagcaattgtttagaatgagagatctctaatttttttaagatttaggagtttttctcattgaaaggatccatcttttggccactaatgagaatttcctagggtgtacttcttccgatagtgactcaatccaatagcctcttcatggaaaccccagggtgtgattttccaggtttaaaacaagttgtttcctggagaaggcaatatcaaagatttcctccaaaaaaattcactcctaggaatagtctaacatagaaaaagactcttttttttttttttttcctgtgagccagcatcttgttctgtcaccaggctggagtatggtggcatgatcatagctcactgcagcctcaaactccagggcttaagtgatcctcccacctcagccttccaagtagctgaggccacaagtgtgtaccaccatgcctggctaattttttttacattttgtagagtcaggatcttgctatgttgcccaggctggtctcaaactcctagcctcaagtgatcctcccacctctgccatccgaagtgctgggattagaggcatgagccaccatacataaccacaaaagactcttgttgccacagatggttaaggatgatgtttgcacgtaagatgcctccagtaacccacaaatttgtggagagccaccagacacaaactcgttaatctgtgaaaccaggcaggccctcctaggattgggttttcccaggactaacgaggcaacaagggttgagacaacagaagtcacctaggatgagatctctttttttttttttttggtggtggggggtgcaggggggaacagggtctccctctgtcacccaggctggagtgcagtggctcaatctcagctcactgcagcctccacctcccagtttcaagtgattctcatccctcagcctcccatgtagctgggatcacaggtgtgcaataccacgaccagctaatttttgtatttttagtagaaacggggtttcgctatgttggccaggctggtctcgaactcctggcctccagtgatctgcccacctcggcctcccaaagtgctgggattacaggcatgagccaccgtgcccagccaggatgggatctcttaagataaactttcctgagagcttgacacattcagaacaagatatgtgctgcttaaaatcttaacatgtctcggacttccagccattttcagactggccacctgacatgacctattaatatcagtccccagaggcagagacaagagagtgttcccacttggtcataagtcaagctctcaagaacataaaacaagatgagaaggaacctcatctggtttttattttggggaccaacagtgaagtttatattccagcccaaccagaaaaacaaactgaccagtctgcagggctggctggaacaaccagcttgagagcgttctgcattgtgtcccccacattggcagagcgacatttgaaccagagtgactccatcttgaataggctctctaggtaaaataaggctgagacctactgggctgcattcccaggaggttaaggcattcataatcacaggatgagacaggaggtcggcaaaagatacaggtcacaaagtacttgctgataaaacagcatgcaggccgggcgcagtggctcacacctataatcccagcactttgggaggccaaggcaggcggatcacctgaggtcaggagttcgagaccagcctgatcaacatggtaaaaccccgtctctactataaaatacaaaattcagccgggcgtagtggcagccacctgtaatcccagctactcgggaggcagaggtaggaggatcgcttgaacccgggaggcagaagttgcagtgagccgagatcgagccattgcattccagcctgggccgcagagcaagactccgtctcaaaaacaaaacaaaacaaaacaccagcatgcagtaaagaagccggccaaatcccacaaaaccaagatggcaatgaaggtggcctctggtcttcctcactgctcattatacgctaggtataatgcattagcatgctaaaagacactcccaccagcaccatgatggtttacagatgccatggcaacgtcaggaagttaccctatatggtctaaaaagggaaggtgccctcagctccgggaattacccaggcctttcctagaaaactcatgaataacccaccccttgtttagcatataatcaagaaataacataaaaataggcaaccagcagccctccgtactgccctgcctacggagtaacaattctttattcctttactttcttttcctttctttctttttttttttttttgagacagagtttcgttcttgtcacccaggatggagtgcactggcgtgctctcagctcactgcaacctccacctcccaggtttgagcgattctcctgcctcagcctcctgagtagctaggattacaggcacctgccaccatgcccggctaatttttgtatttttagtagagatggggtcaccatgttggccaaggtgatcttgaactcctggcctcaagtaatccacccgcctcccaaagtgctgggattacaggcatgagccaccacgcccggccttattcctttactttcttaattactttcactttactctatggattcatcttgaattctttcttgcgcgagatccaagaaccctctcttggggtctggatcgggaccgctttccggtaacactatgggaccccttgttatgacagagcaacaaaaaaagacaaaaacaaaggaaaggactatttctgggaggaaaaaagatcaaacaatagtaatattcctaccaaaaagtacaccagagttgccacacccaagactagccacacaaatccttttctcccatcaatcaaaattttgcagagagaaaaacgacagtcatttttactatttgcttgactggattttacagagagaggctgggagcccggctggtaagaaattcttacccttctgccagtttgtcaggtcctgggtttccttcactgcagctcccaggagagcagaatggtgtcagtctcctgctcacagtgccaaaactgtaggggccgagggacaatttctccttctccctctgaaggtttgctggaaaatcaactgaacaaggcagattaattagagaaaaggcatgcacatgtattaacatgcacgcggaggagaaccacagagtgattatcctacccaccgtgctgtacagaagcttatatgccatgttggggttacagaaaaaacaggcagagggggcactcagagcacgtccaaaaatggcttatggcagcaaatcaggttatagcggcaaatcaggttatagcggcaaggagggattggaggggaagaagagaagtcctggctagcataggtgggcttgttatgcagatgaagcctcccaggtagcagtcctcagaatagatggtgtttcctaaagacttttaaaggcgtcagattctttcctagatctggacagggaagagactcagagaaaacctggctgcattagtgcagatgttttttctatagatgcaaatctcccacataaaagacagctttgccacttctgttcacaggccctctgaacagtcatctcagaatatgtcaaagaagtgtattttggggtgaaatattttgatttccttcacccctaaagagaaattcaacccaaatcagccaaaaactgtgttgagccactactgtgggtgtgcacaacgggaacggagcccaatttcctgtccccgggcctgatagccagggagccaaaaccacagagagaaattgtatcgtgccaagagatagagcaggaacacgaaagagcatgggcacttcggaagtgtgtgaaaagagtgagaagtgtatccagctcgtgcagcctaggagatgcagcttgccaagtggagtgaatgctgcctttcagtgctctcacctctgctgggcatgtttgtgcagtggccaacttgctcaaccgtatgcaatgaccttgaaaagaagtctcctctctgagcttagaactgagtaatgtctcaaactgaaagagaataaatacatgctggatttgagtttgatgagacgctgcccattgagaaaatctgttctatgccttatgggattaattcaggaataagtaaattgagtaaagagatttgaactccagatattcaaagagctcttgacaaggtgaaaccctgcctctgattgagactgactagagccggggtcctgtgtgaccttgatgctgatgtaggggatgtgggataggacagggaaatcagggcaatcttaataccagagaaagaaaacaagggattcacttttttttttttttttgagacggagtttcgctcttgttgcccagtctggagtgcaatggtaggatctcggctcactgcaacctcttcctcctgggttcaagcaattctcctgcctcagcctcctgagtagctgggattacaggcatagtgccaccacacctggctaatttttttttgtatttttagtagagatggggtttcaccatgttggtcaggttggtctcgaactcctgacctcaggtgatccacccacctcagcctcccaaagtgctggtattacaggtgtgagccactgtgcccagcctgggattctttttttttttttttttcttttttgagatggagttttgctcttgttgcccaggctggagtgcagtggcgcaatctcggctcactgtaacctccacctcctgggttcaactgattctcttgcctcagcctctctagtagctaggattacaggcgcccaccaccacgcccagctaattttttgtatttttagtagagaaggggtttcactatgttggccaggctggtcttgaactcctgacctcaggtgatctgcccaccttggcctcccaaagtgctgggattacaggcatgagccactgcgcccggcaggcattcactttcttaaacaggatatagatattccaaaatcacaccctggtcacaacacaggaaacagtaataagagtaactgatccttacgcatggttgctatgtgcgtatgctgccttagacagttcccaggtgttaattcatccacttggagctctgcccatctctaccttgaagaagctgctgttcagtctttcacttcatgcccagtcccctgggcctccagatgctcagaaaccctcagtcctgtctgaggcagactccaggcttttaaaaaccctagatggctaaaatgaaatagctaaaagagatcccagtgcctgcctccgggacaagaagaaaggagaggtgaaggcagagaattcacaacaagcctttggggaccgatgtttcatttggtttttttaactttcaatttaatttgatggaacatctgaggattccttgttgctgttgttttttctgttgtttgtttagaacaagttttttattatttatttttatttatttattttttgagaccaagtcttgctctgttgcccaggctggaggtgagaggtgggggccgtgttaagaactaggctcaggcaggtgcagtggctcatgcctgcagccccaacacttttggatgacgaggtgggaggatcacttgagcccaggagttcgagacaagcctgggcaagatagtgagatcctgtctctacagaaataaaaataaaaataaaaaaattagctgggcatggtggcacacacgtgtagtcccagttacttgggaggccaaggtgggaggatcgcttgagcccaggagtttgagaccaccctgggtaacataatgagacctcgtctctacaaaaaatttaaaaattagctaggtatggtatgtgcctgtagtaccagctactcgggagtttgagtcaggaagattccttgagcccaggactcaaccacaactgtaccacagcactccagctggggcaacagagcaagaccccatctctttttaaaaagtttaaaaaaggaaaaaagaaaagaggaccaagctcatttctggaatcttgtttctcttaattctagttgccccttttgaaagatttttagcaagatagtttgcccttgctttgtggggcaatttctatgcctgggttgtttcttgttttgtgtattttttctagtttcgctctatttcttttgatataaaaggtttgggagttttattgtttgggtgggttatgtttttttatttttgtctttgattttgtgatttacttgtttttacttattcagggtcctctttgggaaggtttaggagagggaggctccgaggttgagcttcctcctctgccttcttagccaggaaattccctcttgtgacttcagaaaagagaagggaagttctgacccccagcatctcaggaaagctgaagaatcccttaggagggcattagaggaacttgcccaaaaacatattaggagagagagaggttcaggcaatgacagattgtgcttccttttttcttttttttttttttagatggagtctcgctctgtcgccaggctggagtgcagtgacactatctcagctcactgcaacctctgccttctgggttcaagcgattctcctgcctcagcctcccaagtaactgggactacaggcacgcaccaccatgcccaattaatttttgtatttttagtagagacggggtttcactatgttggccaggctggttgaactcctgacctcgtgatccgcccacctcggcctcccaaaatgctgggattacatgcatgagccaccgcgccgggccttgtgcttgctttttttttccccctcttgtaacaataggtaacttggaagatttccagtgtgaccttcattcgtgcctaggtggccaccaaaccccaactccaaggccttgccagttttttaaaattctaacacattgaacgaaataatggcattcccagcaacctggatggaattggagaccattattcttttttttttgagacggagtctcgttctgtatccaggctggagtgcagtggcgcaatcttggctcactgcaacctccgcctccggggctcaagcaattctcctgccttagcctaccgagtagctgggattacaggtgtgcgccaccacgcccagctaatttttgtatttttagcagagacgggatttcatcatgttggcctcgatctcttgacctcgtgatccacccacctcagccttccaaagtgctgggattacaggcgtcagccactgctcccagctattattcaaagtgatctaactcaagaatggaaaagcaaacatcttatgttctcattcataagtgggatcaaagctatgagagcacaaaggcataagaataattcagtggagtttggggactcatgggaaagagtgggatggggtgagggataaaagactacacattgggtacagtgtagatggcttgggtgaaaggtgaaccaaaatctcagaaatcaccaccaaagaacttatccatgtagccaaacaccacccgttccccaaaaacgattgaaataaaaaaaaaaccttaaatactaaaaataaaatataaaattctaacacattaaacttttgaaacatatgtgcacacacacacacacacacacacaaatcctaattaatcagcaaccatgtaaagaacaaatgtgggaaatgctgtatatgctatgagaatttcaattacaaatgacaacgttatacattttactaatatttgcttttgctttaaaaattttaaaatttacattaaatgtaattctttagtgtacaattctatttgttttggcaaatacataaagtagtgtaactactctgtcaacaaagagtcaaacttggccaggtgcggtggctcacgcctctatcagcacttagggaggccaatgcaggcgattacttgaggacaggagtttgagaccagcctggccaacatgatgaaaccccatgtctactaaaaatataaaatattagctgggtgtgttggcgtgtgcctgtaatcccagctactaaggaggctgaggcaggagaatcactggagcctgggaggcagaggttgcagtgagctgagatcacaccactgtaccgcaggcctgtgtgacagagcaagactccatctcaaaggagtttaaaaaaagaatcagactctgtaaaatattttaacagatttattctgagccaaatatgagtggccagtggcctgtgacacagccctcaggaggtcttgagaacatgtgtccagggtgttcagggcccagcctagttttgtacatttttaggagacaggaaacatcatgcaagatatacattggttcagtccagaaaagtgggacaactgaaagtggggggactcgagcttataggtagatttttaaattgtctgatttgcaatgggtttaaagagttattatcaatagaaaggaatgtctgggttacaaaaaggggttgtagagatcaaattttatcacgcagaggaagcctccaggtagcaggcttcagagaaaagagattgtaaatgtttcttagcacacttaaggtctgtgttgatgttaagtaggtacaaaagtaatttgccatgacctttaatgacaaaaaccacaattacttttgtagcaacctaataaatgctggtcagcttttcctgaattccaagagggaggagggtataatgaggcacgtcctctcatcatggcctgaacccgtttttcaggttaattttggagtggcttggctgagaggaggggtccatttagactgttagggggcctttgaattttatttttggttaacaactcccacaatcaaaatacaaaagagttttccatcatcccaaactcccacccgctccccccccgcacccccccaccgccccatgctacccgttgtggctaccccacccccaagcagaagctactgctgatcagtcatccatcctgacagttctgccttttgagagtgccatagaaatgataacgtagaatatgtagcccttggagtctggcagtttttctcttagcataatgtgtttgagattcattcttattgctgggttagtagtttgtttcttattatggttgaggtcctcttcatttcattgcttggataccatattttattcatccattccacacttgacggctatttgggtcatttccaatttttgcggggtttttttgtttgttttttgttctttttgcccaggctggagtgcagtgacattatcttggctcatggcaacctctgcctcctaggttcaaatgattctcctgcctcagcctccctagtagctgggattacaggcgtgtgccaccatgcttgcctaacttttatatttttagtagagacggggtttcaccacattggccaggctggttggtctcgaaccctgacctcaggtgatccacaccccctcagcctcccaaagtgctgggatgacaggcatgagccaccgtgtctggcctaatttttgttttttagccataaagctattaaaagcattggttaacaggattttttgtgtgaacggaagtttttatttatcttgagtaaccatctaggtgtgagattgctgtatcatctggggagagtaggtttaactttgtaagaaactggcaaactgtctctgaagtggttgtgtcctattgtgttcctagtagcaatgtatgaaagatacagttgtcttgcatactgtccagaacttggtattcgcattatgggtttggtttggtttttatagccattcagatagatatgtagtataatagtatctcattgtggttttaatttgcattttcctaatgtctaatgattttgagcatttttcatgcctttatttgtcattcatatatcttctttgctaaagtgtctgttgaaatatttgctcattttgtgctgtttttgagacagggtctcactctgttgcccaggctgaagtccagtggtgcgatcgtggctcactgcaacctctgcctcccaggctcaagttgttctcccacctcagcctcccgagtagctaggagtaaagatgtgtgccaccatgcccagctaatttttttgtattttttgtagaaatagggtttcaccatgttgcttaggctagattttgtctgtttttaaattaagctgttttttctttttgttgggttcttcatatattctgaatacaagccctttgtcagatatatgatttgcagatatttacccctagtgtgtggcttttctttattttaacagtgtctttcacagagcaaagtttaattttgatgaggcataatttatcttcttttttctttatggattatgtttttggtgtctaagaacactttgcctaacccaaggtcatgaagattttctccaatgttttcttctaaagaatttatagtttgatgtttcacactcaggtcaaaaattcattttgcgtttgttattgtttaagtgtcttagttcatttgaccacaaacggggtaatttagaaataatggaagtatatttcacatcgttctcaaggctgtgaactccaagatgcaggtacaagcatattgagtttccagtgaagccccagtctgtgcttccaagatggtgcctcaaacactgtgttctcacatagcagagagtggaagggtaaagggtctaagctagttccttccagcccttttattaggcactaatacattactgagggtggaggctgcgtgacttaatcacttcacaagagatcccacctcttagttccaccacagtggggattgtctcaacacatgaattttggggaacatccagaacatagcaataaggcatgagatgtaggtcaaggtacatttatttgcatatggatgtctaattattccaggaccatttgatgaaagcactgttcttcctccattaattctgtttgcacctttgttaaaaatcaattgatcatattcatgtgggtctattgttggactctatattctgttccattgatcaatttgtatatccttcgagaaatatcacattgtctcaataactacagctttatagtgagaagtagtgggtgttgcacttttgctctttttttctgaaatgttttggtgattctacttcctttgccttttcccacaaagggtgtgtgtgtgtttgtgtgtgtgtgtgtgtttgagacagggtctcactacatcacccaggctgctagaatacagtggcatcatctcggctcattggactctgcctcccaggttcaagcaactataggcatgcaccaccatgccaggctaatttttgtaatttccgtagaggcagaggtctccctatagtgccaaaactggtcttgaactcctgggctcatgcaatttgcctgcctcggccacccaaaatgttgggttacagatgtgagccaccgcacctggcctcccataaattttagaatcactttgtcaatatctgaaaaaaaaaaaaaaaacctgctacacttttgatcgggattgtgttgaatgtatatacaccaagttagggagaagtgaaattttaacaatatcaagttttccaatccacgtatgtattatatgtctacatttatttaagttttctttgatttctttatttttcaaaatttttttgtcttctccgggtcagagttgaattatttgatttctttagttcatgttttgtagttttcagcatacaaatcctgcatgtgttttgttagacttatagcaaagcattccatcttttggtgctgttgtagatggtactgtttttaaatttgttattctcaattttttattgctacatatagaaatataattgggttttgcatattgaccttgttcctgtgtacttgctaagctcacttataagttctgggaagtacttgtaaattccttgagattttctatgcagaccagcaaatcatatgacaatagagaaaaatttatttctttttgacttatatgccttttatttctttttcttgctttattgcactggctaggactttaggaacaatgtttagcctattgatatggtgaattaccttaattgattatttaaaatgttgaatcaaccttgaattcctagtataaacccaacttggtcaccttgtgttatctcttaaaaatattgctagatttaatatgctaatattttgttgaggatttttgcatctaagtttatgaaggatgttggtctgcaattttcttttcttatactgtcttgttctggctttggcattaaggtaatgctggtctcataaaattttccggaagaaattttgtagcattgttattaatttcttcctttaatgtttgataacattcaccagtgagatcatccggcatggagctctttgttgttgttgttgttgttgtatggcttttccatacaaaataaacttctttaatagctataatgtttttcaagttatctcttttttcttaagaaagtcttaatggtttatgtttttcaaggaattggttcatttcatctaagttgtcaaattcatggacatagatttattcatactatttattttttaacgtctatagggtctatagtaatattgcctctcattcctgatattagtaatttgtgttttctctcttttttcttcatcagtccaactagaagtatatcaattttattaatcttttcaaaaatcctgatttgggatttctttgctgttttttagttttcctattttatttatgtctactccaatttttattatttcctttcttctaaatactttggacttagtttgttcttttttatcccatttttttaaggtggaaactcagataattgatttgaggccttttttccattcattgtggaagcgtttaccttcacctcctggagaatggtataatcatggggacatttgctcccaagacagaagtttgctctctttatccattttctcagaataaaagacctccccgcttctgtcttccaaggattataagcaaggaggttttatggggcgtttatgaagatgctgctggagtttgtcttaagaaacaggaataaaatgcatcatgaaaaagatggtgatttttatgtctcaagaaaacatccctaagatgtgaaaagaagacgtatgaaagctctcccatcacttcagctggagaggagacagtgagggttggggcaacagaaagcaaagtggggaggaacaaaggtgggggatctagagacttaaaagctgcctagagattggagtcttgagtgataggagaagtacccactggtgtctgtgtcttagtcaaggtcttcctagaagcagacaccaagacagatggacttggggacatcagtgaaggataaagaagaggtagtcagaaaagatggagagacccttcagatgactttgccagcctgacaccaggagaaaggaagaagagtctcaaactgcagtacagttccaagaaagtgtcagtcaggccagtggggaatccctgagtcaaggtaacccaaggtcccacatctcacaaagatggaccagtctcagcacccatcatgctcagacattgactggcagcagcctggaggaagttgggcgctggcactaacacagtggtaggtccccaaagagagcatgtggggctatcagtcaaccacactctcacagcagaagggtgagccatgcattttcatggctgccaccacagtatggggacagggaacagtgtgggggtaaaaagcctaataatgcatgctctcctttgtcctgagctgctcaacccaaccccaactccaggggcactctggaaaaggcacctgggcccctgcttcgggaaaaagaggaaacatcatgagagggcacctcctgcaggaactgcaaatgcaaggcaaacttgtcagcctccagaggcctcagggagggcagccaaggtgggtgacagcagggagccgggggctgtgcaggagcaggatgggcacatcctctaagagcactcaagctcagatttttgggtaggggggcttttatcctattttattttattgatgtataatatacatacaataaagtgcacgaatcttatgtgtatagtttgataatgttttttttttgagatggagtcttactctgtcacccaggctggagtacaatggcatggtctcagctcactgcaacctctgcctcccgggttcaagcggttctcccacctcagcctcccgagtagctgggactacaggcatgtgccaccacaccccgctaatttttgtatttttagtagagacgggtttcactatgttggccaggctgatctcaaactcctgacctcgtgatccacccacctcagcctcccaaagtgctgggattacaagcgtaagccaccgtgcccggccttagtttgataatttttttacacatattgtcagcattcatcattttagcaattctggtgaatgtcaagtttagatttattgattgatttatttatttttgagacagtgttttgctcttgttgcccaagctggagtgcaatggtgcgatctcggctcactgcaacctccgcctcctgggttcaagtgattctcctgtctcagcctcccaagtagctgggattacaggtgcacaccaccacacccagctatttttttgtattttgaatagaaacagggtttcaccattttagccaggctggtcttgaactcctgacctcaggtgatccacccacctcggcctcccaaagtgctgggattacagacgtgagccactgtgcccggcccaagtttagatttttaaaatccagcatgctagccaagcaaaacggaactgtgggacctgcaggcagccagtgtgaaaacctcacacctaggagtttttcattgcctgtacaggtgcccacagcacacacacatctggaagtcaggcctctcctccacttctctgaatactcaggtgcagtccctccagagggcagggctcattgcccttgcagtggatcccatctctccagcccatgtctacacagttttaatattcccaaattatcaatcacacaaggtgatggtatgtattaggttattgttatcatcatcatcatcaccaccaccactgttaggatgcacaaatgcaaaaggtacaaaattcaaaagacagaacacgatgtatgagttatcggttgctgcctaacaaattacctcaaaatgtagtgtcttgaagcctgggcaacatagtaagacgctaagacactgtctctacaaaaagtaaaaccagccaggtgtgggggcatgcacctgtcatcccagctactcaggaggctgaggtgggaggatcacttgagcccaagagtttgaggctgcacatgagccatgattgcaccactacagtccatcctgggtgacagagcaataccctgtctttaaaaagaaaaaaaaactagttggtggcttgaaacaatacatacttatacggtatcacagggcttctgcagggcaggagccagggaatggcccagctggatggctctgcctctaggtctcccatgaggttgcagctaagatgctggtctaagccatgatcacctcaaggctttctggggctgaacagtcttccaagagtcttcctcacccctagcaaggggttggtcgctgttggctggaggcctcagtgtctcccatgggcttctccggagggctgcatggacctcttcatgactcagcagccagcttcccctggagtgagtgatcctaggaagcaaggcagaggccacaatgttctttatgacctagacctggaagccacgctctgtcatttccacagtatcctgttggttacagaggtaaatcctattccctgtggaagagaactataccagggcgtgaataccacaagggtgccaggcatggtggctcacacatgcaatcccagcactttgggaggccgaggcgggcagatagcttgagcccaagagttccagaccagcctggacaacatggtgaaactctgaatctactaaaatagaaaaattagccaggtgtggtggtgtgcacctgtaatcccagctacttggggggctgaggtgggaggattgcttgggcccaggaggtagaggttgcagtgagccatgatcgtgccactgcactccaaccaaggcaacagagcaagactcagtctcaaaaaacaaaaacaaaaacaaaaacaaaaccacacacacacacacacacacacacacacacataacaaaacaacagcaacaaaacaaacaaaaataccacaagtgtatacagtaaatgggaatctccctcccacccattttcccttccagaggcaaacccatgaccagtttattgtgaattctgccagcaatacacacacacacacacacacacactctcacacactcacactatgcgtccacttgtataccttacttttttttactcagtatatcctagaaatccttgcatttcaggacatgaagacctgccttatttcctgaaactgtgggaagccattccattgtatgaatgactcgtaatttctttggccggcccctgtcagtggatattagggctgctccctgcatttccctactgtaagcaatgccacaataaatgaatgagtgtttatatccttttgcacaaggacaggagtatttaaggataaattctggaagtggaccagctggagaaaaaagagcctgtgctttttttttttctttttgacagagtcttactctgtcacccagggtggagtgcagtggcatgatcttggctcaccgcaacctccatctcctgagttcaagcaattcttctgcctcggcctcccaagtagctgggactacaggcacccgccaccatgcccacctaatttttttttctttttaagacgtagtcttgctctgttgcccaggctggagtgcagtggtgcgatctcagctcactgcaacctccgcctcctggggtcaagcaattcccctgccttagcctcccaagcaactgggattacaggcatgcaccatcacgcctggctaatttttgtattcttagtagagacagggtttcaccatgttggccaggctggtctcgaactcttgacctcatgatctgcccgcctcggtctcccaaagtgctgggattacaggcatgagccaccgcacccggctcttgcccagctaatttttgtatttttagtagacgggatttcgcatgttggccaggctggtctcgaactcctgacctcaggtgacccgcctgcctcagccttctgaagtgctggaattacaggtgtgagccactgtgtccggccaagtctgtacattttaaaatttgatcgatgttgccacattgccccccatgaaggttggttgtaaaaatttatgctctcaccagcaagaaaatggatttatgaaggcttgggtggtaatggccaaaatgtagggcattccctgggcagttcagtaagtaattaaaaatggaatatcacctgtccgggtgcagtggctcatgtctgtaatcccagcactttgggaggccaaggcaggaggatcacttgagaccaggagtttgagaccagcctaggcaacatagcaagacctgtatctcaataaaaaatttaaaaattagctgggagtagtggcgtgcacctgaagtcccaactactcaagaggctgaggcaggaggattacttgagcccagaagttcaagactgcagtgagctatgattgcaccactgtaagccagcctgagcaaccaagcgagtccctgtctcaataaaataaattttaaaaagaataaaaagtaacatggaatatcacccatccctgttctttgaagcctttcccagccccattccacaaccagagagcctccctggccctctctcacgccatgtgctggactttttctctctctggcttgcttgttcctggcccctggaatttctgttcttgccttaaatgcagcaagtgaggaggtatttgccagccagaccccaaaggctgacactgaaatgccaaatggttctccaagatgtgtcatccaaccaagacagcttctcctgcacagacccctgccctctactcggggtgggcagccttctctcctcatggataaatatgacgtgttcatgggtttgccccaatggactgtgagctccccaagggtagaggcagtgccacattcatccctggatccactgcctgggtagtggcacaaagagggatccagtaattgctgaatgaatgaatgaatgacccagacagaactttgtcaaaccagtgctgtcaaaagcctcttggatgtactccattgacattaggtgggtctaatactctcaggttatattggcctgcaacatttatttcacatctcgaaggcatttttcaaaaagcattgcttctgttttatttatttatttttagagacaaggtcttgctctgttgcccaggctggaatgcagtggtgtgatcttggctcactgtagcctcaaactcccaggctcaagcgatcctccctcctcagcctcctgagtagctgggactacaaacacgcaccaccatgcccagctaatttttgatatttttgtagagatggggtttcactatgttgcccaagctggtctcgaacccctgggctgaagtgatccacccgcctcaacctcccatagtgctgggattccaggtgtgagccaccacgccctgcctgcttctgttttcttttatttctcctttccccctttggcctggttggagcctcaaggggaaaatccatgctgggaaacaaaaacaataatgcccgtgaacatgaagtggatgtgcagacagctggaatgataaatgcagggcatacacacacacacacacacacacgcacatacacacacacagagagagagagaaaagaataaacaggcagacgggcagggcaagtgggtgcgggggcgtcagtgtcatctcatggttccgtagagtcgagattatctcagcttcaaatccaaggcccctgcagcaagcccgccctcaagattctcttttgaagtcacagtttgccaaacatctctgggtttcctcctttaaaactaatcttcttaaccatttcagtaaaaatcttttcaaaatgccccacattttatggctttgagactcagtgtctttagtatgttacggtatctataaagaaagcagcatttaggccaagtgcggtggctcacacctgtagtcccagcactttgggagactgagacaggaggatcacttgaacccaggtgttcgagaccagcctggccaacataatgagacctggtctctacaaaagattttttaaattagctaggtgtgatgggttgtgcctttagttccagcactttaggaggtaaagctgggaggatcacaaggtcaggtgttcaagaccagcctgagcaacatagagagaccccccccgcctcccctacatctctacccaaaatttaaaaagttagctgggcgaagttgcatgggcgcatagtcccagttactcaggaggctgaggcaagaggatcgcttgagcccaggaggtagaagctgcagtgagccatgattgtgccactgcactccagcctgagtgacagagcaagacctcatctctaataaataaataaattgaaataaaataaaaataatgttttaaaaagaacacagcatgtagtagtttgggaatcagacaaatttagggtcagtttgaggatctacccaagctaaacagtaggacctctgtttcctttgtttttctttaatttgttttcccaattttttgttttggaaactttcaaatcaatagaatagttataagaaaagttcaacgaatagccagagatcagggactggtaaacttcagcccacatcctggttttgtatgagctaagaatggtttttaattttttcaaatggttggaaaaaaatttttaaagaatttttcataacacacgaaaattacatgaaattcaaatatcagtgtccatgacgttaactctcttgtttaagtattgtttgtggctgcttttgctttgcaacagtgaagttcaatagttgccgtagagatcctggctctcaaagcccaaagtacttaacatttggccctttacagaaaaagattggagactcctgaccccaatttaccaattgctaatattctgcctcctttgttttctctctctcttgctggaatgtttgtgttcatccttaaatacttcagtgcctatttcagtttcttatactgaaagctgggaatgacagctttagtgtgggaagagataagataacataaaatgtttagcacacagtgcttggcctgtagacagaacttaataaacgatccaaaaaaaattcctggcattgagcacagaggtggttgccagaatccctaacctgaaaatgccgagccccactgcttttctgaaacccgggttcccgcagtctggaagccagcttttcctccaaaagggcttctttcctgagaagtagcaaacgcctcggagaaacctcattctttccacagctatgtggcttggctgactcaacttctgcctgcccctgagtcacgagtttttcctctcttatttggaggagcgaggccctccaccctccacccagctgtccccacgcacagccagccccgctgggaagtggatggacagctgggagaccagtgcgtgctgcctccagggcgtttcttggagcgccattcagatccatagttggaaggaaggacagaagaggagactgaggtccaagtgggccctggaccaccagcaggacaaggctaggaggaacatcctccctctagtttcccagtcatgaaaaggcttccttctcccgaggcctcctctgtacggacaaggtgttagatgccaggacactgttataaagagacagccctgccttcccaggggactggctcccttccaagtctcacagccacctccaccccagccagggcctaccctccatgagaagcagctccttgccagggaggtggcggagctggcactgagcagtcatggatcgcagccttgaaggctcagcttgaagtccccctccacccgctggtgacaagcagtgtgtacacaggagatggtgtttcccagcatcccaatggccccactgaccctcctggttattactctgcctgtgggatctcagaccttgtgttttctgctctctgtggtatagaggcctggctgccccttcaggacttgtaaacccaaacgtatattcatctggaggtgcaaaagggggtaaagtgccccaagggggaaaccagagggagtgtggggaccatagtggaggggagaacacaaggcccctctaaagaggacccgcattctcaaatcttctgatttaagagaagctgaagatcctgatttttatgtgaactctccccatatgaaatgttcacagcaatgcattttaaaaatgtttaaacactttgaaagcaaacagacattattcgggtcttgtggggttcagggttacttaccaggcggtgacttctgttgaatgctcataaaagctgtccttgctgatgagggcaacggtagtgggtgggcgccatgaagtggtagtggggagggggctccccaaggccacagctggtggccctctcacttgcctgtcccctctccctccccctccgtcaccccctttcccttcccttctcagctgggagaggaccgtctccagcactgggcccacctcacagcctcgcccatagccccctgccaagagagcaggcacctcttctagctccagccccacagccctacagcccatcagccctccccccgctgctcccctctcacctggtcctggcccagcaggcctgccccggcctgagccacccctctcagggtgcccaggtggagttctatttggcaagacaacctgcatctatgtgacaggtagggactgcgttcctcctatgcgctgcccgttctcagcactcggtatgcaggggtgaaccagaagaaagtcctgtctgaacacgagaagaaattactgtctagcccgtggggctcacagcctgggtgggaggcaagccaccagcatgacttgtttatgagcattccacagaagccacagcctggtaggcagccctgaatcccacgagcggcctcaggagaggactctgggttgggagatgctttgcaaaattacaaacacgggtgactgtggagggagatggggtggagacagggaaccgctttgggtggccagggcagcctccctgaggaggtgacagtttgaggtctgatggaggtagaagcaaaggcctgaggctttaaggaacaggaagaagcccatttgagaggacctgtggggaggaggccagggagggccaggaaggcctccgggcactgaggcctgggaatttccttctgagccgcacaggaggctcaggtgcggttgagtcaggggtgacataacttgctgctagtgttggacctgggtgacgggcaccagggtcccctggactattctctttccttcagtttgaaattttccactataaaaagcttaaaataggccaggtgcggtggctcactactgaaatcccagcactttaggaggtcaaggcgagaggatggcttgagctaaggggttcgagaccagcctgggcaacatagtgagacctccgtctgtacaaaaatacaaaaactagccggtcctggtgggctaattctcctggggtcaggatgatttctgtgcaggctgcagtgagccgtgaccgcgccattgcactccagcctgggcgacagagggagacaccgtctcaaaaaaaaaaaaaggttataaagtgctgctgcattttcatattacgattattgaccgctgagggtgactgtgctgtgaggcccgccggaggcaccagaaggcacaagcctcccactgcccctttccccgccaagtcccgcaggtctcgcagtcgcgggcgcccccaccccacccctgcccaaggccagggtcgcagtcccaccgggtgacggcagtcgcgctccgcgtggggcagcggcgagcggaaagggaagccgggcggggccagggggtcaaacacgggcgacagtcccgcccagccccggacctgcagcgcgcacaagctcgggcgccctccgagcgccgcgcccaagccccgcccctcccgcttcccgggctccgattggccgagccaccgcgggggcgtgtccggcggagctggccgggacccgggcggagcgggcggggacccgggctactgcggtgtggactcgagggctgggcgcggggccggcgcagaaggtgagtccccccaccgtcccccggccgggctgcgggtcgcggggcaggcgcatgaggcgagtctcccatcaccacccccggacaagcgagctctctcccgccgcgcggtcttggcggctcctgggccggcggggcgcagtgccgctgactccagcccaagaagaggcctgggaagggcgctcctgggcggcttgcggggtgaacctgcagggagcctggggagagcggtcaggggtcagagcgtccgaggcggaatccccggggaaacgcgcagatgtaagctggtggaggtaagggggtcgcgggccacccgggactgcaggggtctcagcgcacccggtcgctggtggtgtttccgggatcctggcctcgtgtggccgccgggacctctcttctcagccccagtctgcagtctggaggcctggatgggaccactgtccccctgggcaggggcgcggcggggggcgctggggtcccagttcctctggagcagttgagtttgtgattcttggtgggagctgccaagggaaacagggtcgggcactgctcccatctcagagaggaaactattgagcaggcccgcagagagaggcggcctggaatctccctcctttctcgtttccccaacacctggcgggccgtgtagggcagaggtgtggtcagcctctttgcaggtgggaaagcagagaggttccgagccacgctgaaacttgatctctgcagcccaaggggagcactcctttggaatttgaacacctctggtatctcctggccagagagggtcagaggccaaggaggtggggaggtagtcccctaatgcgctgggatcgtccctctgcacagcgtcgttcccactggagtctgttgtgagctgagatgactctctgacttcggcctgcgtccctgcacacgtcagccctccgggctgccaaaacacaggccaggcagccctgggtgaactaggggacctgcccaacccagcccaccccgaggaaggaagggggattggccagtgtggcctggagggtgggacagcccagccaagctgacggacctgctcgggatggggtgggcatcaggcatttggagcgcaggcaacacccgctggactctgacttctggagttctgatttggtctctggttgagtgcagctttccacagctcatggttattttggagccgagcttcctgatcactcagcagggaccttgggcagtgactttgatgtggtggaagtaccttccccaagggggcttttgtgaggattaagtgaaataatgaacgtaatatgcttaactttgtgcctggtgagctctaagtgctcagtcggcggcacttccagttttgttttgctttgtttttcattaccggtctcttcccggaggagggccttccaggaatcacagggctggacagagcccaggggcggcccctctggagggagaggaggcttggcgcctgatgctgcagtctcaatgcacatggagaaaacctcacatcctcacgctggcctgggagcctgcaggatgtctcctgccggcactgcaacctcatctgtcctccttgccccatcgctccttcctccgcagcctgacttcacccattccaccttgagctgctccccaggaccggagctctgcccctagatctttgcacagctgacttcaggctggagtgagttcacttcctcccaaggccttccttcctcgacctccaccgtcctcccaggccctgccctgctgggcgcaccagtctttttcttcacagtgtttagcactggctctcagaaaagaccctgtgaatgtacttctagtctcactggcaagaagtgtgcattcctgaagggcctggtctccagctcccggctgtaacctcgcacagtgtctggcacacagtgggactcataaatatttggaaaatgaaatcaggcaggcatggaagcagggtgggtctgcgtgcggcccaggtccctgcagggaaggaggagccccgatctggaagtcaagggaaagtccaaagggctgagctgcccccagaactctgattcccttggtgaccctggccctgcacgtccctgagcaggttctccacctgtaacccgaggcagagcagttacagcccccaccccatcccccaccgctgcccagctcctactttccagggctaccatcttggggccccacgcatctctcatttatccaaaatgctgtgtccggagtaggagagaggacaggacgactcccgtcaggacagtaccttgtgtggcctgttcagcgtgccctgcagtgtgtgcattatacattttacaatgtggcatggtgtagatcaggggttggctaaccttttctctcaagagctggtagcaaatagtttaggttttgccagccatacagcctctgtcccacatggctgtgtttgaataaaactggatttagaaaagctggcagtggcccagatttggtgtagctctccagcccctgctgttgatcacgtatcacacctgggctgccacatacagaacctggcttcatggcttctgcagccacacgggggctctcaggatgtggctcccaagccgcagtgctcacatgagcacctccagcccctgtgcaggcagcaggattgctgagcctgagagcccccacccctctgaaccctcaaagaaagatgcaggtctgttcgttgcctggtctcccaggcttactgagcctgcgctggggtcacccctctaccagcagccctggggccacactggggccaatacaggcactcagggcccagaggctgccaggaagctctgtcaccaacatcttcccgaggcaggccggccccaaatgagtaaggacagggctcagcttttttctcccctgtgctaagcaagggaggttcacttccctagtgagaacaattaaaaaaaaaaaaaggattcccagctgggctcagtggctcatacctgctatcccagcactttgggaggctgaggagggaggattgcttgaggccaggagttcaagacctatctaagcaacagagtgaaccctcgcctctaaaacaaatttaaaaattagccaggcatgttggtgcatgcctgtggtcccagctactcaggaggctgaggcgggaggctttcttgagccctggagttcgaggctgcagttagccctgattgtgccactgtacttcagcctgggcaacaaagcaagacaatgtctcagaaaaaaaaaaaaaagaaagaaagaaaaaagcattccccatctaactcagggctgctgtatttgccaagaaaaacctacaggcaaggtcaaaccaggatgtgaagttgtggtcatgtagagaaggtgagcatgccggggcagctcccaggaggatgttgtctgccccgcccctcgcccaacctgggaccctctgcaggttcacaaaggagggcacatgtgagcccctggcttccccagtcagtgtgtggggtcagctctcagcccagcccctttcatcgccaccagatgcccctcctcgcccttcctggtccacattttaccatcagcagctggacactagccctaagagcctagagggggtctgtgagtcatgggtgggggcagagcagcaaaggggtcccatgtggagtgttctgcaccccctccaagggctgcagagacagcgtcatggactctgccctctgctggacgggtccagggtggattgggcacccctgcctgcagctctcttctgcctggtgctgctccttcccttcctccatgccatccacttggctggcccagtctccagagctcaacaagcccccagggttgcgggagggctacctgctctctgggcacaaagcccacctgcctcagctactgaatgtggaggctttggtctgcagtctcaggtttgggttttcatcccgtttcaccagtggcctgacttctcagcacacagctgggctgggggcacacgtggccttgcttcttcggggctcctgacatcccctgcaggtgcccaggcctggatgccatgtggtcaccctatcaggcccagccaggcgtcccatcatgagacatgctcagcggcccccagcccatggagcccaggacccaatccagacactggcctgtaattcttttccttttgaagaccttaaattagaagaagcaacacgtgttcccatttcttgaaattggcagatattcggatttcatcgtgtttgctgctgcctttttttaaaaaaacttttttaaaaatgaaaccttatagacgaaagtggaatccaatctgagccctccattcctggtcacatctatgtcctctccccaggctacttactcctgactttctccttcctatcttttatttttaccattctaaccactttcaagtgtacagttcagtagtgttaagtatattcccattgttgtgcaacagatctccaaaactttttttttctgagacggaactcactgtgatgcccaggctggagtgcagtggtgtgatcttggctcactgcaatctctacttcctaggttcaagtgattctcctgcctcagcctcctcagtagcagggattgtaggtacataccaccatccctggctaatttttgtatttttagtagagacagggtttcaccatattggccaggctggtctcgaactcctgacctcaagtgatctgcccgccttggcctcccaaaatgctgggattacaggcatgagccaccacacctggcctctaaaactttttaatcgtttaaaactgaaactccatacccagacaacctccgcattccccttctggcagcccctggcaaccaccattctattttctgtctctatgaatttgatcagtatgtatatctcatataagttattacagtatttgtccttttgtgatgggcctgctttacttagcatgatgtcctcagggctcattcgtgttgtagtgtgcgtcagaattaccttccttttcgaggctgaatagtattccatggtatgtatgttccacattttgttcatccattctcccattgacagacgtttgagttgcttccacctcttggctattgtgaatgatgctgatatgaacatgggaaagcagatatttattttagtccctgctttcagtctggatatatatccagaagtggcattgctggatcatatggtagttctgtttttaacctttttttttttttgagacggagtctcactctgtcgcccaggctggagcacagtggcgcgatctcggctcactgcaagctccgcctgctgggttcacgccattctcctgcctcagcctcccgagtagctgggactacaggcgctcgccaccacaccaggctaattttttgtattttaagagacagagtttcaccgtgttggccaggatggtctagatctcctgacctcatgatcccccctcctcggcctcccaaagtgctgggattacaggcgtgagtatttttaactttttaaggaacttccatgctgttttccttaggggctgcaccagttcctattctcatcagcagtgcacagtttccagtttctccacaccctcaccaacacttgttatttattttttgttttgtttttttcccctcctttttttttttttgagatggaatctcactctgtcacacaggctggagtgcaatggcgccatcttggctcactgcaacctctgcttcctgggttcaagcgattctcctgcctccgcctcccgagtagctggaattacaggtgtgaggcactgtgtccggccttcctcctacctatttttattcatagatatagttcttgaacactttcagaatgttatgtaattcctgcataagtggtgtcactttacatacaacattctacaggctgtgtttttccactccacgtttgttgtttgccgtcagaccacattgatctgtatctctcattgcgtgagtagccccgggtttttatccttttccctgctggtaggcattttggttgtctctgctgggcagtcattgctctttgtggaatgcagttctggttttgtcagattgtccctcagccaggtactcggtgatcagtcatggtgggacaggtcagttctgtcactggtaatcccctaggtttgcagtatacagccaagatcagcaagctaaaaatagcagttcttacgtaaggtagtgtgggcagcccttctcaggacacttgtgatctgcaggggcaagtggaacgggactcgagggcccagcatcttctgttctgcaatgcatccaccctcacactggggccccactctggctttctactggtggccaggctcagaactgcagctcagtgacccagaaacactatgggtgtgatcagctcagccccaggcgtgccgtgtgtaccggaatgcatgtgtgcacgtggtggtggtggggccagctctcacctcttcctctgtagaggtaagagctgagtcatgcatggtgggccttgggacctgcttggaaccgtgccaagctacttatgaagcatctagtatgtgcttggcatggctccaagaattgtggacacaatgaacaagaagaagctcctgttctcatggagctaagaactgagcagggaagcagaaaacacacaagcaatgaatagacaagcaaacagcaggtcctgttaaatcccacaaagaaaaacgattgaatcccagagaagtggccagcagaccttttctacaaagggccaggtggtgaatattttaggctttgtcaccatgtagtccctgtcaccaacactcaactctcccattgcagtgtggaagccaccagagacaataataaatgaacgaatgtggctgtgtcccaataaatctttaacaaaagcaggctgagggccggatttgactctcagaccttggattaccaatgcttgtcctgggtgtgggaagaggctgcctgagctggggttgtcagggagaaccctttcaaaaaggaactgagaacccgttgcaggaaggagctgaccctgggacagcctgtctcaggtaggacacaatggcaccttgccaccgatatggtggcggagttatgtgctgagaaatgggcaggctagatttgagaggtaaagatgatgagatttactcatggcttgaatattggaggtacaggaagggggagattcaaggatgtgtcctaggtctggggtttgaactcctggatgaatggtggtgtcactgaaggagaggaagaggtgcaggtctgcggaggtttgttgttggatgtgttgagtttgaggagcttattagacaagcaggtgaacatctatgctgacagccctcctagagcttggagaggccaagactggaggcttggaatggggaatctatggcatttatggggtcttcaaggtcgtgagtctggtgggctggtgtgtgtgtggaccaagcagggggcgcccggcatgagctctgagttagtgcttagtgcttagggcaccaacagaggggcctgtgtggcctcacactccactcgggacggcagcatagtgcgagctccagggcccctgcctcctagcatcgcctcagttcccctcctgtaaagtggggattctgccttctggggttgggtgggaactaaatgagatagtcacgcttggctgacaggaagcactcggcgcctgtgcttgtgatggtggtggtgactgctgcacttcctgggtggttgcgtgggttgcagggcctgtgacagcttggtttggtggatggcagagtcagggttgggttgggggtagagacacccaggtctcctggcacagaccgttctgatgtcccgttgaggcctgttccgccctgtttttcaaggctccccagcggggctgaacctctgccctctgctgcccacagtagtagccggctcagtagcactttttttttttaagagatagaatccactcagtcacctagctagagtgtagtggcatgatcatagctcactgtagcctcaaactcctgggctcgagcctcctcttgcctcagccttccaaaacgctggaaccacaggcatgaaccgctgcacctggcctaagtagcacactttatcactgccttcccatccctgtctggcctccacatcccctttactgggaaatcccccttccctccccgtagttccctgtactcccgtctaagggtcagcttccgaggtgatgcttctcagtgctgggcaggcctgcgggttactgtgcgtagtcagtgggctgcctggcatggtgggttagtcagttgggggtgggcagcgtggttctgacacccccatgcctgagcctggacatactccttgtctgtctcctcctgcagccgccagctggagacgatggtggaccacttggccaacacggagatcaacagccagcgcatcgcggcagtggagagctgcttcggggcctcggggcagccgctggcgctgccaggccgagtgctgctgggcgagggcgtgctgaccaaagagtgccgcaagaaggccaagccgcgcatcttcttcctctttaacgacatcctggtgtatggcagcatcgtgctcaacaagcgcaagtaccgcagccagcacatcatccccctggaggaggtcacactggagctgttgccggagacgctgcaggccaagaaccgctggatgatcaagacggccaagaagtcctttgtggtgtcggccgcctccgctacggagcgccaggaatggattagccacatcgaggagtgcgtgcggcggcaactgagggccacgggccgcccgcccagcacggagcacgcggcaccctggatccccgacaaggccacggacatctgcatgcgctgcacgcagacgcgcttctctgccctcacgaggcgccaccactgccgcaagtgcggcttcgtggtctgcgctgagtgctcgcgccagcgcttcctgctcccgcgcctgtcccccaagcccgtgcgcgtctgcagcctctgctaccgcgaactggccgcccagcagcggcaggaggaggcggaggagcagggcgcggggtccccagggcagccagcccacctggcccggcccatctgcggagcgtccagtggagatgacgatgactccgacgaggacaaggagggcagcagggacggcgactggcccagcagcgtggagttctacgcctcgggggtggcctggtctgccttccacagctgacccccggcctgcagaacatctgtccccaagccagctccactgcccaggcccccaagagggcagctccagaagctgcccagggctccgggaccccatcccatggtggcaggtgcagcggtggggagtggctctttctggactcccagtgcctttttgctggacactgtgtccttatggcttcactgcaggtaatgcctttcccttcaggaagccccagaacacccacaggtcttggtaacaaacgccaccttacactctgcaggctgcagcggcagctccagatggcctcctgagctggacgaccccaggtctccagacatctagggaccagagcaggtttgggaacacagagggaagacaggatgggagtgtagccacagaacccacctgcaccctgacaggcacaccccactgaagagcctgagtcccaggaggcctcctggaagcccaggactgcccacccaccacgctggtgcccaccgcctggccagccaagccctgccgatcagacatgtgggctccccgaagcccagccagagactgccgtgctgtgggtgccaccaggcccagggactgcagcctgagctccccgaggcccagggcagccgggtgaggactctgtcctgtgtcacctctctccaggtgtccagctgtctcatgcctttttgtcctgtcctcagctctccgtgtggtcagcgaaaccattgttttctgttaggactcagttgcaagaacagaaaccctgcccccacttaataataaaaaagaaagtttattgatgggtggttgcaaaacaaacccaggagtgtccttgcttcagacatggctctgtccatggttgaaaatgtgctaggtggcaaaaatctaccactgtcccccacactgggagttcttgtgtatgctggctgcctgaaggagacagacgctcatgctgtgccttggctgggctcccccaggacacaggtctgtccgggtgccatgaccgtggcctgatgcctgctgccctattcactttggtgtgggcgatctcagtggatggaactgaggaaacaaatagccatttgtgtggctctgccgggcctcccaggctgagagcttccccgtgcagtcctgcctggccctggggctggtgctatggagagggaaactgggccccaggtacaccagcctttctcagagtgagtgtgcattgggcctggggctcgaggtcagcctcccaacgcctggccccatgctggccatggaactggggatcctttaacagtgtcccacgagtgcttctgcactagtctttcccagcgcctcagccttggcaggactggggcatggactggggttgctgtcagctagaagtggtgaccgtggggctgggagttccctgcccacgcagtacagcatctgaaaccccactgacagggcctctccctggcctagcaccatcctcctggggccagttctcagaggttcacgtgcagacagaaccctggagggtgcagttcgagtgcagattctgattcggcaggtcgaagcccagctcccagggcctgccgctaccaccacccacagaccacccttgaggtgacaaggcctgctggtggcctgtgggcaccctgtgagggaggcgggagggtcagtatttttgtttgtttgtttttgagacagagtctcactctgttgcccaggctggagtgcagtaatgcgatcttggctcactgcaaccttcacctcccgagttcaagcaattctcctgcctcacccctgccaagtagctgggattacaggtgcccgccaccacacctggctaatttttgtatttttagtagagacgagttttcaccatgttggccaggctggtctggaactcctgacctcacgtgatccgcctgccttggcctcccaaagtgctgggattacaagcgtgagccaccacacccggccaaggggtcagtatcaaagcgccttcgacctgccatgcttggcagaatgaccagtgtgggaggcccactggccttccaggaaggacctatttgtttacagtccctttctctcccttggcctccctgaaccacacaaactggttcaggctggttctgcctgggcagagggcacagggtgagacaggtcacggagctgggggtgacttcctggacagatctagtgccctctccaaaacccagcccgggcagccctgtccctgcaccctgggactgaagccagggcagggtgtgttggctgccaccgctggcctcttctcacagcacactcccctgcctgaaaaccctcagagcctgaaaggcagcgttcactaagataggagaggggaccacgtgcagctgagcccggccaccaccagcctcctctacagcttcctgccaagggggtccatgcacaggaccccaggctgactgagtgcagtgtcgtcctctccaggtcatggcaggcagcgccctggggtctggctgagtaggtgattctcatcccttagcccaggactcaggtctgtgtccctctcccctgcagggctggaacagaactgctgctgccccaagtcccaaggtgttagggcctgtaagggcccacggcttggggtggcccaggaccttcgcagagccttcacacctgcggtcttgctcccgcaccagctgggccatgccagctgctggggacaccgctgggagtgagacaaacaaggcccgcacagcatggtgggggagacacaggtgcagaagccagggtggagggtgctatgatggggacgggctgagaatgagtgagccacgcctgcctggtggggagaggacattccagcagagggaacagtcagtacaaaggcaggaaagggacccctgtgacctgagctgcgtggctggagctgggcccccagaggcacggggcagccacctcgggtgccccagagctgtcggagccttctgcacgcagcaaggctgatctcggcttttgagaatttgtcctgactgctgtgcatgggtggctggtgggagagggggtctggcagccatggaggccggcagctgtccgcttccctgggatccccaagggcggacctgcgcttcactgaggccacatctgcctccgattttggctctggctgtggactggaagccttagctgccctccttcccatcctcagctccttccaaggggcaggccccctcccctgttctgctgagaagttttttgtttgtttgtttgtttttttgaaacagagtcttgctctgtcgcccaggctggagtacagtggcacaatcacggctcactgcagcctcgacctcctaggctcaagccatcctcccacctcagcctcccaagtagctgggaccacaggcacacccaatggcacccagctaatttcttatttatttatttatttatttattgagacaggatttccctatgttgcccaggctggtctcgaacttctgggctcaagcaatcctcccacttcagcctcccaaagtgctgggattataggtgggagccaccacacacccagcctatgctgagacatccaacaggcactgagtgtcagcttccaggctgacagccgagggggcgccaggaagcagaatgacccccaggactgcatggtgtttggggccagtgtgagtttgaatgaatcggggtccctggccactgaggcacagaggggagtatgctgggagagagcagagccacccaaaatggaagatgtgggcctggccagtgggcccgggaagggaaggtgctgccctggaggccctgtctccaactcctatcaggtttattttccaccagagatggcctcctgggccaggctcgggtcgacaggtgaagctaggccagctgcccaggcagtccccggagagggccctgcctcaaggagcaagcacggaaggggaaggccagcctgtagagcttgcagccgtctctcctgcttcgccacagcaccgctgccagtccccttcttgggtggggaagctccttggaggctctggaagttgtcttcagtcccagccatgcagctgagctttgctcattgcctgcactccgcccccacgcctgggaaggtcaggaggcctcgggccgaggcctctgctgtttgcagatgctccctttccccagagctgagcctgaggtctggcaggagcacggggctgctgggccagggtccagcctcacgctcctgcctggggctttgcttgcaaggcctggcaaggacacgggaaccaactgtcctgccagccgagtgctgctgtccacctctcaaatcttcctcccagctgtgcctggactccatgtccctgccagaagccggtccttcgcacaggcagcatgggattcctgggaggcgcctgcctcgtcccctgcctcttcctaggaggtgcagaggggtgaggagagggtccgagaacaggcccatgcatttgaggggcatcagaaccccaccactccacccacaggggcaggccagaaccgctcctgcaggaatcagcccagagcagtgcagctcaagatggcaagtacagtcacagctgtgaccccagggctctttgggattgatgacagcccctttatttattattattttttttatttttttgagacagaatcttgctcttgtcgcctaggctggagtgcagtggtgcgatcttggctcactgcaatctctgcctcccgggttctaagcgattcttctgcctcagactgccgagtagctgggattacaggtgcgtgccactacgcccggctaatttttgtatttttagtagaggtggggtttcaccatgttggccaggctggtttcgaactcctgacctcaggtgatccacccaactcagcctcccaaagtgctgagatggcaggcgtgaaccaccgcacccagccagctctccctttagagctctgcaggatgcagtgttcccacgggacccagaggctgcagacactaaggagactttcacaaaggtcaagtagcccctacctgtgggctttggtggttgggatttttccatgccaagttttcttaaagatgggcccgccatcatgtatgctggtaacattggggtgttgcctgccagaggccagggagccaggcggggggttcacaggtccccaagaattttgtccctccttgatgatgatggggtgcaggtgctgatggtggcagcgactgccacttactgaggcccacccatgcgctggttccaaggaggcagagacaggtcacgtgaggccatcctaaggctaaaggagatatgtcatgagccctgagagagggatagacaaagccagagaaaggaactcccaaaacagctgggtgggcttcctggaggaggcggtgtttggttgagcctcagaggatggtaggactttatcagaggattgtagtctccacgaggactgggactctgggcctttttggtaactgtcttttcctgtccttggcactaaacatatgttgaatgaataaatgagtcaggtagaaaatggggctgggggcatcggggtagagaggatgataatgaaagcaactgagcttcaccctggagcctccaggccaggctgtggatgggaactggtgttcctggtgtatttctacaggagcagggccagcaggagggctcagcctggcccagggtttagggaacagtccccctccaagacgctaaatgtgagtggccttctcaggtggggacaggaatgcccaccccaccccacccaagtagcgctttctggagctgggtctgacttgatcacaggccgggctccaggcttccatggggctgtcgtccaggctggcaccagagggtttccgctggcctggccacttccctgcccagcctgttctttgaacaaggccagaaagaggcctaggagaaggcaaagccgctcctgggctcagcccctgggatggggcctggaggtgactcgaaggctgacccagttcccagccaggatccgctgccacccgggccacacgcgcaaaccaaggcaaccacttccgctggggccgtctctgaggagatgtgcaggaagtgaacttcctggggctgagggcaggggagaggccgcctcctaacacctcatgcccgcaggcccagggctgcccctcagcccttgctggctgggagaaggagggtcctctgcctctgtctgcatctaggctcttcacctgggaggcgcccacaccgtccatgcccgtgctctgcctctgccctcagcagacttgatggaaccggtgcccaggagcaaaacctcaggcaacgcaggggcccagagtgggcagagggaggggtctgcctcgacggcccagcagatctgggctccggcctgtcctgggctgcttgctgaccccatacccaccatttccccagtctgcctgtgaactttggcccggcccttcctgtgaacctggcacagaagccacctcctctctgaagccttcctggcttgccccaggtagtgtggatcacccatctgtgcccccagaggcccggtggcccctgctccagctctcccacctccactctctacaaggagcctcaggcagcctgtgccccccaaacctggccttggcatctgagctccttgaaagcacaggtgtttctcatttgtttttggcctccatggcccccaacccatggtcctgcaccgctgggcatcgcacaggtgcttcccttgcaaggaggaattgtcaacttccctagctcctggaggacactgggaagatgtcacagggatctcaaagcccatgtgtcccaaaatgacagcattggctttgcccaacccgcttgtcctgcctctgccaacacctacacctgggcaacccagccaaaccctaaggtgtctctcgaccctttcttgctccttccacctcctcccctacgccttccagggccccaggcccagaatggaggcatctgtggtgcattcaggcacctgaaggagtagccctgcaggagtagctcaggcgaggccacagaggcaggtgtgggccagtgtagaagggaggacagggagtgaccccagggagactccagcctcctctccatcatcccctttggcgtcagggctggaaactgggcccagagggtgggcgcaccctgcacttgtgtgtcagggtcgggccaggagcagagctgcggccagctgtgtggcctctggcctcccaagccccctctcctgctggcttccatcaccaccaccaagtccagctccgaatggaatgttccaatgctcagagcagagcagcaggcagggaaggaatggggatgtgggcaggcagagccagacatttctgggcaacaacaaggggaaatttcaatccttggagcatcagctcagggttcctgccagacattctgaccctgaaacacaggctttctggagaagagggcctgcccactgtggtcccaggctgggaggcagagagcctagggcctggggctggtcatctgggctgcccagaagtgcccgaggcagtccctgtctcccgcagcagcacagctacgcccatcatgcttcctctagctgcccacggcagcacctgggctatggggacctgggctccgggattctggagcagcacactgggacacttcgtacagtttgcaaattactaatacccttaaaataccaaaatgcctttggatttcagcagccaccagacctcctgggggcccccaccatgaagcagaggcctttgaacctcgcctgccccagccataaccacttgctggcacaacccaatccctgagggtttctttcccccacgccagagctggagttggtacagagagagcaagagtcaaagcacaactgctcagcaagttttgggggtcgggggcgggaggggggactgggcttctaacaagaccgtttcgtgggggccgggggtgctggtcatacaccccgtggcaggccacaggctccccaagccccctctattctgcgttcatgctgtttctgcaccttgaaacccggcacattcatagctccatgcccacgtgtggctgggagtgagctcccagggtggcagctgccagtggcacagcacttctccacccggaacctcctcttcctcaccttctgctgcacagcctgatacggctgaccccacccatatcctggctctagaaatgggcacaggacaggggtctaagcagccagtgcacccatcccccgactatagtctttgagggtcaaaagcctctactcccactgtgcagagggaggggtggtccctggagcacaccagcaggtgagtcacggtgcagggctctcaggagagtccagggaaagggatggaggtgaggatcttggggtctagattcattcccagaatgagcctgtccgtagttggggagcactgcacggttttaaatcagttacagagaaaaccacccagcaatgagcaactccaagatgtgaaggggagcattcagtagcacaatggacacagtgactggcgcctttgtgcaaacccaaaacaatggactctcactcagcaggtctccccctcacggctgatgaacatgagtcaaagccggaggaggcaacagaattcagagacaaacctcaacttagaggacactgatgcggaagaacccagcggcttccagggcttactctgttaaagcgcccgtgtccctactactaggtccaaggtatttctgcatattggtgtcctctccaaaggtcaaggagcaagcggttagggaaatcagtaagtcctcaaaggagtactgggagaaattagcatgggggccggacacacagttcagagagtggggacagccagccatgtggcgatgggtcatccctgccttgggacttttgttttcttttctttttgttttgttttgagacagggtctcgctctgtcacccaggctggagtgtagtggtatgatcacagctcactgcagcctcgacctcctgggctcaagcgatcctcccaagtagctgggactacaggtgtgcaccaccatgcctggctaactttttaatttttggaaagcttgggtcttgctcttgcccaggctggcttcaagccatcctcccacctcagcttcccaaaatgttggcagtacagccttttctttcttttttaaatcaaggtaaaacctacacccagtaaagtgcacagatcttaagtgtgcacctcagtgagattttgcacaaacacgtaagtgtgtaaggcaccatccagatctccagcagtcccagaagtctccctctagcccgtccccatggtacctgcctccaaaggttacttggtgttctgatttctatcacaagtttttcctggtgttttgttttgttttgttttattttgtttagagacaaggtcttgtcacccaggctggagtgcagtggtgcagtctcggctcattgtagcctcccaggctcaagcgatcctccctactcctcctgagtagctgggactacaggcatgtgctaccatgcctggctaactttttttctaaagatgagatttcagtttgttgtccaggctggtctcaaacttctggcctcaagtgatccttctgccttggcctcccaaagtgctgggattacagatgtgcaccaccatgcctggtcctgttttttttgttgttgttgttttttgttttgtttgtttttttttttttgagatgaagtttcactctcgttgccaaggctggagtgcaatggcgctatcttagctcatcacaacctccgcctcccaagttcaagtgattctcctgcctcagcctcctgagtccacacctggctaattttgtatttttagtagagactggatttctccatgttggtcaggctggtcttgaactcccgacctcaggtgctccacctgcctcagcctcccaaagttctgggattacaggcatgagccaccgcgcccggcaacctggccctgtttttaaaaaacgtcatataaatagaatcacactgtgtgcattgtgctgacttctttttttttgtgtttttttttttttagatggagttttacttttgttgctcaggctggagtgcagtggcacgatctcggctcactgcaacctctgcctcccgggttcaagcaattctcctgccttagcctcccgagtagctgggactacaggcatgtgccaccacacctggctaatttttgtatttttagtagagacggggttttaccgtgttgtccaggctggtctcaaactcctgacctcatgtgatccacctgcctcagcctcccaaaatgctgggagtacaggcgtgagccaccttgcccagctatgctgacttcttttgcttaaacttatgcctgtgagattcctccatattgttgtgggcatctggcatttgttcttttgcatcgtggtaaagtatcctgttttatgaaccttccacagtttcttacccacgcactgttgatggacatccaggtggtttccagtttggggttgttatgaataaagctgctacaggcatttctgtagatgtcttttggtggacagaaacactaggtacataactaggagtggaactggcccaccgggtatatgcatatctgattgagtagaggccgccagttttctgtagtagttacatgaatctgcactccactggtgtgtatgagggttccagttgctccacgccctcaccagcacttggtgttttcagtcctttcactgtgatcattctggtgggttacttggaatacaggtctcagacactgtcctggaatcggagctcgcctcaccagtttcatggggtcggtctggggacgggaggggcagctgttcctccagcattcaggcagagcgggtgcctgagactgacatcgtgtgggtgttaggcccagttccaaaccaaagaggcagtcagcatatttatggcatgcacaggttggcattggtgcaaaaaatgaaagaggagaaaactgcccgccagcttttaaatattttatttattcattcagcaaatatttgagtacctacaagcactggggctacaatggtaaataagacaaaaatctctcccctctgggagtccactctagtgaagggagacagacagtaactacaactgaaagtgtgttagagtggccgggcacggtggctcaggcctgtaatcccagcactttggaggccgaggtgggtggatcacgaggtcaggagttcgagaccagcctgaccaacatggtgaaaccctgtctctactaaaaatacaaaaattagttgggtgtggtggtgcatgtctgtaataccagctactcgggaggctgaggcaggagaattgcttgaacctgggaggcggaggttgcattgagccaagatcgcaccactgcactccagcctgggcgataaagcgagattccatcacaaaaaaaaaaaaaaaaaatgtgttagagtctctcatatctgtggcatctgcatcttttccagcactaggaagattcccagcaaagaggggccacactgtttggaaatacacgtgcctgccctttttagttcagctctgctgaggggcttgtgtgtttgctgaaaagattatctcaacattcttccccttgctatagattgtctcatttggggaaaaaaacatataatagagtgtattagcgagtagtaagtgctatgggtaatgacagagaagggaagagacggtgagggctgggtggctacggtttcagatggagcagccagacatggcatcactggaaaggtgaaattgagtcaagacctaaaggaagggaggcagagggctatgcagctacttgggagaagaatattccagacagagggaggagcagctgcaaatgtcctggggtaggaacctcctgagcctggaggggcctagagcagtgaatgaggcggagggtgccaagatgactgcagagaggtgagggggagaggagatggcggagggcctgggatatgccaggagccacagcgtgtggcacacacagtcttacttagctttttttttttttagacaggggcttgctctgtcacccaggctgaagtggagtgcagtggtgccatcatagctcactgtagcctcaacctcctcggctcaagcaatcctcccgcctcagcctctagagtagctgggactacaggtgcaccaccatgcccggctaatttattttttatttttttggagaggtctggctatgttgcacaggtgggtctagaactcccaggctcaagcgatcctcctgccttggcctcccaagtagctgggactacaggtgcaccaccatgcccggctaatttattttttatttttttgtagaggtctagctgtgttgcccaggtgggtctagaactcctgggctcaagcgatccttctgccttggcctcccaaagtgctgggattacagctgtgagccaccatgctgggcaggaactttgttttttaatgacaaggtggagattcctactagatatggagaggctgagtgggccagaggaaaatccaggctgcccaaacacatttgggagtcaccagtgagtaggcaagtcaggggctgggtgagtgtggataggaagagaaggctccaagaaatgagccctgggacaccccagggtctgcaggtcagctatcggaggtcggagcagcagaggagatggagaaggagcagccagtcccgctgcaaggggaaggccaggagagcctggggccagaggcgcagccaggagggagggaccaaggaaggggaggactggaaactgacctcgggcttaggaacgtggaggtcagtggtgcccttgatgaaggatcttggtggggtggtgggagcagatgcctgcgggaaaggaacgagaggacggaagagacagattagcagcggcaagcacagaaactcaccggaggaatgctgatgcaaagggagagagaagtggaaccaaagcgagtttggggttttgaaaaaatagcatttttgagatattgttcacatcccataagatccgccccctctttggagtatccaactcagtggtttttagtagtcacaagattgtgcagccatcaccactatccaatttcagaacagtttcatcaccccacagagaaaccctacacccatgacgagtcactacccgttcctcccacctcccagcccctggcaacggcgaacctactttccacctctgtggatttgccttttctgcacatttcatgtaaatggaattatacaatacatggtcttttgtgactagtttctttcactcggtataatttttttttttttttttgatggagtctcactgtgttacccaggctgcagtacagtggcacgatctcggctgacagcaacctctacctcctgggttcaagtgattcttctgcctcagcctcccgaggagctgggattacaggcatgcgtcaccacgcccagctaatttttgtatttttagcagagacagagtttcaccatgttgcccaggctggtctcgaactcctgacctcaagtgattcacccgcctcggtctcccaaagtgctgggatcacaggcgtaagccccgtgcctggccttagtataatattcaagattcatccatgtttagcgcggatcagtatgcaattcctttttatggctgagtaatagcccatcctatgttctacacattttgttattattcaccagatgatggacatttagttgtaatgctttttggctattgtgagtaatgttgcttgtgaacactggtgtgtgtgtgtttttgtctggacatatgttttccactctcttgggtatatgcctaggggtggaattgctgagtcatgcagtcactctgtttaacgttttgagaagctgtcaaactgttttccaaaacggctacatcattttacattcccaccagcaatgtacaaaggttctgatttcttcccaacctcatcaatacttgttattctctttattttaaccatcctagtagggaaaaagtggtatattgtggttttgacggctgatggtgttgagcctcttctcatgcgcttagtgtccacttttaaattaggacatttgcctctttttttgtagcgatggagtctcattatgttgcccagtctggtcttgaactcctgggctggcagaagcaatcttcctgcttctgccacccaaaatactggtattatagacatgagccaccaagcccagccacgtttgtctttttattgcttagttgcgagcattctttatacattctagatactagtcccttatcagatacatgatttgcagttattttctctcattccatggtttgtttttttcactttcttgatagtgcccaatgcacgtaagttttaaatttttgatgaaatcccattaacctattttttcatttgccacttgtgtgtttatgtcatatctaagaaaccactgcctaatccaaggtcataaagagttattcctatgttttcatctaagggttttatagttttagttgttacatttatgtctgtttagacttaattttttttttctaacaggaaaaaaaggaggattgctggattcaagcaatcctgtcacctcagccacccaagtagctgggactacaggtgcatgccaccacacctggctaatttttctattttttgtagagtcagggtctcactatgttgcccaggctggtcttgtactcttggcctcaagtgatcctcccaactttgggtcccaaaatgctgggattacaggtgtgagccactgcacctggctttgacataatttttttacatggtataaggtaggcagtagacttcattattttgcatgtagtcatgcagtagtcctagcactactggttgaaaagacaattattccccaacaaaattgtcctaatactcattgacattttggttgtttttaatattggagaacaaatgtgcgtgttcatgctaatgaacctgtggaggctgtggagagggggaatcagtgacacagagaggaagaggagaatgactagagtggcatcccctgatgggagagggggtggacctggtgtccagtggaggaggtggccttaaagcaaggtcagttcacagtaacaggaagaaagatggttgcctgagtgcaggtggagatggtgggcattctcttctggaggcttcatttttcctagggaaatgggaagcaaggtcaccactggagagaaagaacaggagaggaagggttgggagcccaagagagaagaggttagagggagaggaaatgaactcagagggggctgccatgttgctggcaattatcccgtattttcctgggataattgccagcaacatggcagccccctctgagcttagtgatgaagaattgaaggtgagagaagcccaggcatggtggctcacacatgtaatctcagcactttgggaggccgaggtgggtagatcatctgagatgaggagttcaagaccagcctggcaaacgtggtgaaaccctgtctctaccaaaaatacaaaaattagttgggcgtggtggcgggcacctgtaatcccagctagtagggaagctgaggcaggagaaccgcttgaactcaggaggcagaggttgcaatgagccgagatcttgccactgcactccagcctgggcaacagagcgagactctgtttaaaaaaaaaaaaaaaggccaggcacagtggctcatgcctgtaatctcaggactttgggaggcccgaggcggggggatcacatgaggtcaggagttcaagaccagcctggccaacatggtgaaaccccatctctactaaaaatacaaaaataaaaattaaaaaattagctgggcgtggtggcagatgcctgtaatcccagatacttgggaggctaaggcaggagaatcgcttgaacctgggaggtggaggttgcagtgagctgagatcactccactgaaatccagcctgggtgacagacgagactccatctcaaaaaaaaaaaaaagtgagagcagtcaatgtggtcaggtgtttttcttcagccatatctgatgaggcagttggagggagaggggataggaacttggggatgccatcatccaaggcctccacagcagggctgcctgttcctggggcaggacaaggctggtgcccagtggctgcagtaagtgaccctctcactggcgatgcttggagtcactcaggtaggtggtctcacccacacaccaggtctatttgacatctcaagggagggggaaatgcccctgccttaggtctggttagagagcacagattagggaagccaccagtaagccctcaactctcccaactcccaacctgtcagcttgggctgccatgacaaaatgtcattgattgggcagcttaaatttattttctcacagttcaggaggctagaagtccaagatctgggagccagcatggttgggttctggggagggctctcttcctggcttacagacggccaccttcttgctgagtcatcacatggaggagaaagagcaacagagccctctggtgtctcttcttatgaggacactaatcccaggatgaaggccccaccctcatggccatatctaaacccccttacctcctgcatcaagtccgctttcacactgctaataaagacatacctgagactgggtaatttacaaaagaaagaggtttaatgcacttgcagttccacatggctagggaggcctcacaatcatggggcaagacaaagaggagcaagtcacattttatgtggatggcagcaggcaaataaagagaccctgtgcagggaaattcccatttttaaaaccatcagattggctgggcacggtggctcatgcctgtaatccaaccacttttagaggccgagacgggcggattacctgaggccaggagtttgagaccagcctggccaacatggtgaaatcccatctctcctaaaaatacaaaaaagaaaaattagctgggcgtggtggtaggcacctgtaatcacagctactcgggaggctgaggcaggagaatcacttgaacccaggaggcagaggtagcagtgagtcaagatcagaccattgcactccagcctgggcaacaagagtgaaactccgtcaaaaaaaaaaaaaaaatctgatctcgtgagacttattcactatcacaaaaacagcacagggatgatccccccgcccatgattcaattatttcccaccaggtccctcccacaacacgtgggaattataggagctacaagatgaaatttggatggggacacagagccaaaccatatcaccttcctaaggtcccatctccaaacaccatcactctgggggttagggcttcaacacaggaattttaagggggacacaattcagtctacagcacctcccaacctgctcttgacctctaacaaggatatcaaacaagcccagatgctaaatttcagaacagaggagagacagaaaaaaagagtggttcctggctctgaaaggagtgtctgtatcaccggcaacctgagtggaaaagaaaaaagaaatctttcatttttatactttctattgtgtattttatagagttgtgattcccaatatgctagccactggccacatgtgactagtcagaattgagatgtgctagcaagtgtaaaatagacaacacgtttcgaaggcttaatatgaaaaaaatggaaatcatctcaataatcttttatattgattacatgttgaaatgataataggttggatatcaggttaaaaaacatattattaaattaatttcttctgtttgttcctactttttaaaagtgtgggttatgagaaaatctcaagttacacgtgactcactttggaggccaaagaagctccatcttggatactaatctgccaagttggcttctgatgaacccccattccaggaaggcctctaagatcccaatttctctatcatttcttgtatgattgcaggtacttaccataaatccttaggtcaaacaaccttgatgttatcctacttcaactgtctacacatcccttctgaaccaccctcccctctggtatacaagtcctgggtcttgggggtgatggcgcggggtccaccatcttgtcttgccactgccaagacacagacatggcttctgtccgtaagtccctactgaatgattctttctaaggaactagatatgccagcctctttctttggcctctcagcttcctcagatgttggggtaggtttgtatacacctgcccatggtaaaactcacgtttggcttgtattctattcatgttggatagcgctgacatagaagaacccaaaacagcccccagcacagccggccctcctgccttggtcagtgggaacaagcacatcagatcaagctctcatgggtctcaggatctgggatggtgctttggaactgaatgttgtggtgggaccacttctctaaggacggcaagatccaaggtgggctgtgagcactcttcctgagtgatggcctttaacggtccccagaggcagccccagggagatgaggacctggctggctgtccaaaaatctgatcaggctggctcttgtttggtttagggatacataaataactcacattttaaacactagaactcaggcatgagacgcccatgcctgcctgtctgttccctctgagccatgccttcatcgggtgggagaaccactaggatcacagcaccatctgcaatccctcttttttctttttttttgagatggagtcttgctctgtcgcccagggtggagtgaagtggtgtgacctcggttcactgcaacctctgcctcctgggttcaagcaattctcctgcctcagcctcccaagtagctgggattacaggtgcccaccaccacgcccagctaatttttgtatttttagtagagatggggtttcgccatgttggccaggctggtctcgaactcctgacctcaggtgatctgcccgcttcagcctaccaaagtgctggcattacagatgtgagccactgcgcccagcctgcaagccctctttcttatttcctccaagcactgaagcatgaatttgtggtaaggtaaataaacgtgtgtgtgtggcatggtggggggatacatccacagaatgtcacgtgcccagccctgttctctgtttgttacacttgactattaggattccagcctcttgttcacatacatagtctaactatttcctttttggtcagaattggaattctttcccttttttttttcctgctattataaacagcagtgctatgaatatctttattgttttccacttgaattattttattggaatgttttccctgaagtgaaattggttggctgggaggtatatatgattttatagttcctgtgattttccttttcatcaaatcactctcccaaaagactgcattgctatgtatcgccttctgcatgtacgtgtgtgtgtgtgtatgcacgtgcgtgtgtggacgtatgtgtataccgttttccctcagccctgccagctgtgggtttgatcatttgtatttatttttactaattaacatggtatataacagatatctcctggatattatatttgcatttgcttacttgctaacaagaatgagtaaagtccttctcttaaaacccagaaaaataaaataaacagccaccacatccatggcttagaaaaacacctctcagctccctcctatgccaggacttgggggcacccacagctgacgccaaggctgcgacacggctggccaggcccgagcttggcctgctgacctgtggctgtcatcatggtcctagaggcctcctccagctaataaagccatttctctcctccagccaataaagccatttctctcctccagccaactgaaggcacatcaggcaatgccctcttctgcatggcttagatgagtcctgcatttcttaattcccatatgttcgttgttgggattgagagacattctgttttacatgcaaaaaaggttgcaggagatgcggctggtgtcctgtccacagcttatgaaaacctcagggcagcctccgcaccctccccctggggaagttacaaaacagcatcctctgagagccactgtctgggcctggcctggcctggccgggacctggggagaggaggaggaaggccttgcctggctggcccaccagagggcgcctcccaccacaggtgccaggctgtgtccccagccctgtggcctcctggctctgcacacaacagccaggcctgcatccctccagccagacatctcagcccagagacacaaagcagtcatccagctaaaacgtaccatctgcctgggaacggcaacactgaagcaggttaatagctggcccagagcagatggtttattccaatgatgactgggtccctgtacccaggcgtcttccttagtgctgcctcgcccaccggcagcccgcagctctccctgggccaggccccactggaagggccagccctgctgcccagaaatcctgccactccgccacccagacaccgaacacccagacacctaacacacagacacctgacacccagacacctggacacctgacacccggacacccagactacctgacacccggacacctggacacccgatcacccagacacctgatacccagatacccggacacccagacacctgacacccagatactgagacacctgacacccagacacctgacacccagacatccagacacccggacacctgacacccagacacctgacacccggacacctggacacccggacaccgagacacctgacacccagacactgagacgcctgacacccagacacctagacacctgacactcagacacccagacacctgacacccagacacctggacactcaacacccagaaacctgacactagacacctgacacccagacacccagacacctggacacccagacacctgacacccaggcacctggggacacccagacacccacatacccatacacccaaaaacttgacagctaaacacctggacacccaacacctagaaacctgacacccagacatctgacacccggacacctgacacccagacacacagacacccagacacctgacacccagatacttggacacccagacacctggcacccagacacccagacacctggcacccagacagtcagatacccagacactcagacacctgacacccagacacctggacacctggacactcagacacctgacactcagacacccatacacccagatacctggaaacccaaacaccggacacccagatacccagacgtctgacacctggacacccagacacctgacatccagacacccagacacccagacacccagatgcccagacacccagacacctgacacctgacacccagacacccagacaactgacaccctgacatctggacacccagacacccagacacccgacacctgacacccagacacctgatacctgacacccagacacccgaatacctggacacccagacacctgacacatgacaccaagatactcgacacccagatacccagacactcggacacccagacacctgacctccagacacacagacacccagacacccagatacccagacacccagacatctgacacccagacacctgacacccagatgcctgacacccagacacctgacactcaggcacctggacacccagacactcagacacccagacactcaaacaccagacacccagacactcaaacaccagacacccagacacccagacacctgatacctggacacccagacaacctgacatccagacacctggacacccagatacccagacatgcagacacctgacacctgacacccagacacctgacacccagacacctgacacctggacacttggacacccagacacctgacaccaagaaacctggacacccagacacccaaacactagatacccagacacccagccacctgacatccagacacccagacacccagacagctgacacccagacacctgacacccagacacctgacacctggacccccagacacctgacacccagacacctggtgggatgtccgggtgtcttggtatcaagtgtctgggtgtctcggtgtcaggtgtctgggtgtctgggtgtccaggtgtctgggtgtcagctgtctgggtgtctgggtggtgaggtgtctcagtgtctgggtgtctgggtgtccaggtgtccaggtggtggggtgtctgggtgtctgagtggcagggtgtctgggtggcagagggtctgggtgtttgggtatccaggtgtccaggtggtgggttgtccaggtgtccaggtagtggagtgtctgggtgtctgggggttggggtgtctggatattcgagtggcagggtgtctggatggtggggtggctgagtatccaggtatccaagtgacactcggacacccaggcacctgacaccagacacccagacacctggacacccaacactcagacacccagacactcagatacccagacacccagaaacctgacacccagacacccggatacccagacacccagaaacctgacacccagacacccagatacccagacacccgacacccagacacccagaaacctgacagccagacacccggatacccagacacccgacacccagacacccggacactcagacacccagacactcagacacccagacatccagacacctgatacccagaaacctgacaccccaccacccggacacccagacatcctgccacctgaacaccctgccactcagtcacttggacacctggatactcagccaccccaccatccagataccctgccactccaatacccagacaccccaacccccagacacccagacactccactacctggacacctggacaacccaccacctggacacctggacacccaaacacccagaccctctgccacccagacaccctgccactcagacacccagacaccccaccacctggacacctggacacccggacacccagacacccggacactcagacacctcaccacccagacaccgagaaacctgacacccagaaacctggacacccggacacccagacacctgacaccaagacacacagacacttgacaccaagatagccggacaccccaccacccagacacctggacaccctgccactcagccacttggacacctgggcactcagccaccccaccacctagacaccctgccacttggatacccagataccctgttccccagacaccaagacacccagttaccccaccacctggaaaaccctccacccagacaccctgccacgtggacacctggagacccctccacccacagaccccaccaccaggataccctatcacccagacacacagacacccaaacaccctgccatcccaccacccagacactctgtcacctggacacgcagacaccctgctgtcccaccacccagacaccctgccaccctgccacctggacatgccaccacctggacacccagacaccctgccactcagccacctggacaccatgccacccagccacccggacacacagccacccagctgccccgccagccacatgtggctgactccctgctcaccctcccaactgcgtcagccatagggaactggggtggggtcccagcacccctgggcaggcagttccataggggattacctccagctgtctttcacagagagacagccaagctacagatcaatcaaccccattcataatcaaagaaaatgaatcaaaccagatgtcagtagtcacccatgaaattaatcaaggcataagacactagcactctgctccttggtggggatgcaatgagatgtgtgcccccttgatgggagagtaagttaatgataccgcctctccagaaaggattctgacctaataaaacaaccaaccttaaaaaaagttgcatacttcacggggcacagtggctcacacccataatcccagcactttgggaggccgaggtgggcagatcacttgaggtcaggagtttgagaccagtctggccaacatggcgaaacccagtctctactaaaaaatacacaaattagccaggcgtggtggcaggctcctgtaatctcaggtacttggaagctgaggcaagagaatcatttgaaccaaggaggcagaggttgcagtgagctgagatcacaccactgcactccagcctgggcaatagagcaagactccgtctcaaaaaaaaaaaaaaaaaaaaaaaaaaaagctgcgtacttttaaatccagcaatttcactttgaggaatgaatcccaaagactatataccagaattcaataaagagaatattaacacagtattactgtaatacttcagcattacagtagtaaaaatccacaaatggaattcacaccaggcacatggttaggcacagtggaatattatgcagccattacaaatatttacaaggaattttaaattacatcaaaaatattatttaacattcattgatacaggtgttcaaaggggcatataggataagaaggcaagtacgttagaaatatacatacataggccgggcgcagtggctcacgcctgtaatcccagcactttgggaggctgaggtgggcagatcacgaggtaaggagattgagaccatcctggctaacatggtgaaaccccgtctctactaaaaataaaaaaaaaataaaaaaataaaaattagccgggcatggtggcgggcgactgtagtcaaagctactcgggaggctgaggcaggagaatggcttgaacccaggaggcagagcttgcagtgaaccaagatcgcgctactgcactccagcccgggcgacagtgcgagactccatctcaaaaaaaaaaaaaagaaaaaaagaaaaaaatatatgtgtacctacatagcattaaaacaattgcaggaaagacaccaaatctgttaccagcagttttctgggttgtgaaatttgtagtttttatttcattatattttctgggtttttctaggttttcagcaacaaatactgacaaaaggaaatgaacagttttcagagacttactttaaaacagagttaaaggaatacacatgaaattggtaacagtggctgcctctggggtcggcataggagcaggccttcccttgcagcttgcgccctcccgtaccttttaaattttgtaccaggcaggtattacttattcaaaaataaataaatttctacaaagaagatacagatatataaatactaaaaccacaggagctgagaagcagcgcttgatttcctgggggaaatcaagaaaagtgctttcggctcctgggggagataagactccaggttcaggctgcccttttaggcccaaagcctccaagtcaccccaggacccagctagttccagtgtcttcactcagcaaggcctgctccatcggacacaaaactgatcaggagttggaccatctcctccctgggcatttttccctgcagtaggggtgggcaggctgtgggaggggctgcagtggacactgggcctctgagctgggaccacctgtgtcccctgggcctgacacagaccaggacctgatgcacgagtaagaatgaatggggcccaatcgcctaacaaaggcaactcaatttcagccccgattgttccagaaggatttgctgtaagcaaccggagaagttggcatttgttcaacatggaaaaagtgtcccccaactttgaagcactgaaccaaacatctttgttgaggtttcattctcacgatatctgcaaatcaacgttttttccttcacactaaaaacgggcaactttagagcccactaaagctatacaaaattgggagggggcatgctctgattttccatttttagttccagggtccgtatgcaggacttatttgcaggaagagcaggaatgatcagttcaacaagaaaagccacactcagttttcacagacagacaacccctccttcccacccctgccctgtcccccatcaacttaagtggcatataaatgattaaagtggcttcattaactccaggagtgtggcctgtgctagggcacctgatttgtgctagacgaggccagcagaagagcaatcgctctgcaagagaaaggctcggcccttccttaatcaccatgggttataattcaccctgacgtccttacacacatggaggtgccaggatactgagctttcctataagcagggcctcagcagaagtgcctccctccgagcctccagggcctgagaggagagccccaagtccctgccctgccccaggacctggggaccaaggaataacattttttgtagagatggaggtctcactatattgcccaggctagtttcaaactcttggcctcaagcgatcctcccactttggcctccaaaagtgccgacattacaagcatgagccacctcacctgacctactcttgcattctttaaagccacaaatctggtaccttccctcttgttccatttgtaagactttgaatattagagatattttacacataatatgtgggaaaatggctttttagaaaaacatttattgtaatcgatcacattcaagtcgtagttctgaaagcaaagtgaaaacacacagtacagctatgcctcagtatccatgggggatgggttccaggactgcaacctcaaccctcagacaccgacatctgaggatgctcaagtccctgatgggcaatggcatagcgtttgcacgtaacctacgcacaccttcctgtataatttaaatcatctctagatttcttataataccaaatacaatataaatgctatgtaaatatgctacaccatattgtttagggaataatggcaagaaaaaaaggtctgtacgtgttcagtaccaatgcaatttcttttttcaaatatttcctatccaaggctggttggatctaaatgtggagaccacagttacggagagctgactgtactggggaaatctttagggtagaaacatttcttagagatggtttatatcacaccacttcagaaagagcaatacaggcatacctcattctactatgctttgtgaatactgtgttttttttttaaattgaaggtttgtagcagcctggcatcaggcaagtctatttggcaccattttccaacagcatgtgctcactttgcgtttctgtgtcagcattttgaacagtaaatatttttaaattaaggtttgtacatttgttagacataatgctattgcacatttagtggactgcaatatgcagtaaacatgacttagatgcactgggaaactaaaacaatgcgcttccttgctttattgtgatgttggctttaccgaggtggtctggaactgaacccacaatatctccgagatatacctgtactttttactaaaaatatttcatttgagaagtaaacctcaagaactaccaggacttttcagatgggaagagcgaggccctggcagggcgagtctaggtgtgcagcctagtgggggccggggtcaagtccactcggtatttgtggcttcactcagcaggccgcccgtcccctccgtggggccattcgacagtccctgggtaggggacggttgcactaggaggtaaacatgattccagcatgggctgctccaaggccctgagaccccaggacctgcaggggggtgggatccagtcctgcagcaggtgctctgaagaggagtcatctcccaagatgagaaggccccggggggaggatgaagtgtggtcagaccgtcggctgagcgtgatcacttccccagacccatgcgggtgagaggactcagcagacgcctccgaagcctgcggcaggcaggcctttactcttcactggggggccagtcagagggctgtcatggcaggccagtgcacatgccaccaacacatgctgcttcatcagtaatttctggaacatgacactgcacagcggtggcctctccagcgggacattactagtaatacactgatgatgtggagattccccagggggcatccgctgggcttctcccaactcccaagccacctcttcagaatcacagagtcatttaaaggggccccccacctccccggaggtgcggcctagtcatcatactggatctcggcccgcagctccttggtgacgtagttcaccagcatggccagcagctgctgctgcagggcctcgctgcccatgaccagcgcggtcagctgcacggcgtccgtccactccaggtgcctgatgatggctgcggcttcgttaaagagcctctgttgctcggcagggggcagctccattaggatctgaggaaccggcttaaactgtccacttgtcatccaggcacctaacagccccccgacagccccccctagaaaacatggaatcgttcaattagtgggtcttattcataagcgatggccttacttaagttcccactgagtgcacaccaccatcaccatgagcaggcacattcatgagcgggctgcagcgggctcagccggtgccacgcctgctccgccagccagtgtggagggcaaaggtttatgcagtcttctgtccatttggctcagataattgacacccaacatgcattccctgggctccacatttaaggatgcaaaatgaagcctgcctgccccatctcccacctcagtgctgggcccactttcttcttcatgagctgacggaggtttctgggcttactgtaaaaatccctctctaatcacaaaggagaaggctgagaaacaaatgcattttctttttcttttcttttttttttttttttttttgagacggagtcttgctctgttgcccaggctggagtgcaatggcatgatcttggctcgctgcaacctctgcctcccaggttcaagcgattctcccacctcagcctcccaagtagctgggattacaggcgcacaccaccacacctggctaatttttgtatttttgtagaaacagggtttcaccatgttggcaggctggtcttgaactcctgacctcaggtgatccgcctacctcggccccgcaaagtgctgggattataggcatgagccaccacaaccagccacaaatgcattttcaagagaaaccatctcaggctgggtgcggtggctcatgcctgtaatatcagcaatttgggaggccagggcaggtggatcacctgaggtcaggagttcgacaccagcctggccgacatggtgaaacaccatctctactaaaaatacaaaaattagctgggcttgggggcacatgcctgtaatcccagatacttggaagctgaggcaggagaatcacttgaacccgggaagtagaggttgcagtgagccgagatcatacccttgcactccagcctgggtgacagagcaagactctgtctccaaaaaagaaaccatctcagtggtgagactgaatttcctccaccaggcagctgatatgctccttgcccctgaacttagaaaatcttcagtgagcccatgtggttaaaggacctggggacagataaggaggctctttcctcttgaagcagtgcttttcatagatcccctccaagttgtatgatcgataaataacaaactggccgggcgcagtggctcacgcctgtaatcccagcactttgagaggccgaggtgggcgaatcacgaggtcaggagttggagactagcctggccaacatggtgaaaccctgtctctactaaaaatacaaaaaattagccaggcatagtggtgggtgcctgtaatcccagctactggctgaggcaggagaatcacttgaacccgggaggcagaggttgcagtgagccaagactgtgccactgcactccagcctgggcgacagagtgagactccatctcaaaaaaataaaaataaatatcaaatgtaaggtagcttactatttctacttctgccaccctaaaagggcagaaacattattgttaaatgtaaactcattgccaaggctatgtcatgctattctgggacttaaagaccttgtatccacggaaagttctacctgaagaggccacgtgcagaatatggtgcagagaagcggaaggtgccctagggaaggggtccaaagtcaagtgcctccaagagccagggaggaactaagaagagtgaaggggcggttgggccttacccggcctctcccctgctgagattggatgggtggcaggctctgacttcatcccagtctatagtctgggccaaccaagccttgaatcgcatggaccttccgaggcccaggacacagaagagctggacagcttggttcctatggagtggcagtggctacttcacgccagttcattgctaccacacaaaataccagatttgtagctttaaaacatctcacgatttttaaatatcaccaatcagatatttaaagatgaagcccactagacttagtgactcactttcaacagacagagtatggaaagggaaacagaaactttgcagtggaaaaacccagcaaacatgcccttaaccaagtgttcaaggtgaatatcactgacgtcatgtgaatatcacacacccccagaattaatgcaagacaagggagaggggcatgtcacctcccaggcatgcctcccaaagactcctaactccagtcccatcctaaacacaactggcaaattcaaactgagagatgttctacgaaatacctgcccagtactcctcaaaactatcaaggctgtgaacaaggcaagtctgagaaagtgttaaaggccagaggagactaagaaagcaggcgattcaatgcaatgcggtgtcttagactggatcctgaaaccaaaaaaaaaaaaaaaaaaaaaaggccattaatgcagaaactggtgaaacccaaatcaagtctggagaatggttaatagtaatgtattcgttggtgttggtttcttaggtttttttttttttttccttagacagaatctcactctgttgcccaggttggagtgcagtggtgtgatcatacctcactgcagcctcaaactcttaggctcaagcaatcctcccaccttggcctcctaagtagctgggattacaggcatgaaccaccatgcctggctaattttttttttattatttttcgtagagacggggtctcattatgttgcccagtccggtctcgaactgctgggctcaagcaatctttcagcctcaagcctcccaaagtgctgagactacagaggcatgcgccactgcacccagcccattttagttttgacaagcatacagtaatacatgtgatcgctaggagaaccgaaactggatggaagatatacaggaatcctttgtactatcttcacgacttctctgtaaacctaatattattgggaaatgaaaagtttctttcaaaaatgcaacccaggccagagagaacccactggcaggctggactcagacaacaggcagcaaaaccagcgcttgcttcttctggaagccaagcaccgaggcccctggagcagacaccaccccgggtactgagctggggccagccccatatcccagaggctgaatgccacacgcagacagggttcacctcctctgcaaaagaaaggcacattctgggaagggaaaaccagctaatttacaagttttactgaacttttccccatgacaccagtgaaatgctccaagtcgacaagagttgcactcatgtgcactaaacctttatgagaacatcaatatttgatttagagcagcacttaatgcaaaaagtcgccaggaatatcgaccagcaaattactggctctttggagaggagaaaattcctttgttttcagggtaaaatgatgctcccgcccatgaccagggactggaagtagtgaatcccccgggctctcttagtggacatcctgttctctaccagcttttactcaatctgaataaaatatgtgctcccaaaatagcatctgggcacagctatatgacaaaatgatccccaaagccttcccctgagcactgagatggaggtgggggcacagatgcacagtgtcatcgaggaagaaggaaacagccttgtctcccccatctccggttccttcccggatggcaagatgctgaagtcaggcctcactaattcatggagtttggaaaggaaaatatggaaagggaaggtctggggccacccacacatttatttttctcctcagtgtgagcctcagcttaacgaaatgtccttgaatgtcaatcccactacagaagggaagaacagggcaggaacccggccagcgagctggggaacggaagccaacctcagcagaaaagttcagctctctgactccatctatggtttgggccacagccccaggccaggtagaccttctgaggctcaggacacaggaattcttccttccccaagccaaagaaagtaacttcatcccagctccaaggaacagtggaaaaattagccaaactttcattcattgcctgaaattgattctcaaatagaagcaggtggtaaatggccaggcacagtggctcacgcctgtaatcctagcacttcgggaggcccaggcgggtggatcgcttgtggccaggagtttgagaccagcctggccaaaaggacaaaaccctgtctctactaaaaatacaaaaattagccgggtgtggtggcacacacccgtagtcccagctactcaggaggctgaggcaggagaatcacttgaacccacaaggcagtggttgcggtgagccgagatcatgccactgcactccagtgtgggcgacagaatgagactcggtctcaaaaaggaaagaaaaaagcaggtggtaaaggaggtgggcaggccctctaagggtgaaaggcagttcttttggtggtctctttcagaacaagggagctctctcagagtgagctggctcacatgaaatggccacaccatatgtgctgagaaggtgcatggctcctcccagcctcctccctggtttcctttctgcagggacctcacagtcatgaaggccaccatgggacccaggacaccctggtatcttcagaggcctgctgctctgatacttattctgggatcccagcactgggggaaagatgcctctaggcccaaatgacacagatgccatttacaagagtaccccacacttctgagacattcacacagaagcctgcatttccaatggggcaaattatatctacaaagatcatttcccagaggcatctttaactccaccaactcctcccacaagacgcatggcaccacttgtacaagttcatttctccctgtgtttcttttcttttttctttttccttttttttttttttctttgagatagagtctcgttctgtcacccaggctggagtacaatggcatgatcttggctcactgcaatctttgcctcccgggtttaagcgattctcctgcctcagcctcccgagtagctgggattacatacaccagacacccgccaccacgcccagctattttttgtatttttagtagagacggggtttcaccatgttggccaggctagtctcaaactcctgacctcaggtgatccgcccgcctcggcctcccaaagtgctgggattacaggcatgagccacactgtgcctggccttctccctgtgtttcaacggcccttttatgacatccccgaggctggctatctctgtgagacacctgcacttaccaacggcgagtcccggtgggccgcccaccaaacccccgacgaaggccatggcccctgtgaccagggcacccttcccagagtgcttgacagccgccttcatcttcctctccccagaaagggagcacagcagcttcatgatgtcctccaccatgatagtcatcgtggcgggccttcgagggagaagttcagagggacagtttcaatgagcataagagtatttccatcacaatgccactctagttcctagagttttaaggaagggtcccccttttcaggaaagctcagcagctccaagcgcctgtatgacagacagcatccagacggtggaaagttcccacagacaggacaggcagcagttagtgaataagcaaatagcagcagctgagtggatgaaaggtcttctttgccctctgattaacttctgacttacgacagattaaggagcaacccggccacatgttctgctggttcatcacgagggaggtggtctgacccttctggcattagtggcctttgcactggcccggggaatgccctgcacacaaagcccagcagagaacgggaagtcccggcgtgaggcatctgagctgaggccaagccagagccagggaagggatgggaccctgtgaccacacgggcactgacctgcagtgggccctgagcagagggtcagatacctcccttctaagacggagacagtccctacaggctggactctcagacagtgccagcaggatgggcaggaagtgcctggcgtaagtctggaagcctgcaggctcccgacccaggatggctctgaacgaacactgttactaacacacacactgggctgccttaagcaactgttcttaaaagtcaacacagttgtacccatgggacactaaaagcagggaaaagataaagcagggagacaaagcaactggagaaaaaatacatgaaatcattcccaggctttgcaatatatatgaatagacagacggacgggcgagtagacctttagcacaatgacctttagcacaatcctccagggtagggaaaatgtgtggcatgctggagccagggcagggagagacgggctctggagagcccaaaggctgagaaaatcaaaggggccacgaggtggggggtctcctcagagctctggctgagcccaaggctccagcagtacttccctttctcaccagcacttcccatttcattctaggtggaaatattgaaacaggtgctacagcaattcaactgaggaagttatggatagattctattgcttattatcttttttttttttttttttgagatggggtcttgctttgttgcccaggctggagtgcagtggcatgatcacaactcactgcagccttgacctcctgggctcaagcgatcctcccacctcagcctcttgagtagatgggactacaggtatgcaatcaccacgcccagctaattttatttttatttttagtagagatgactactatgttgcccaggctggtcttgaactcctgggctcaagagatcctcctgccttagcctctcaaagtgttaggattacaggcgtgagccactacatttgaccttaatatctttgggttatatgttttatgaggtttttttgttttgtttgttcgtttgtttttaagagacagtgtctcttgttgcccaagctggtgtgcagtggtgcgatcatggctgactgcagccttgaactcctgggctacagtgatccccccacctcagtctcctgagtagctggggctaaaggcatgcaacactacgctcagctaattttttgttttcatagagacagggtctcgcaatgttgcccagcctggtcttgacttcctgagctcaagcaatcttcctgcctcagcctcccagagtactgggattacaggtgtgggccaccgtacccagacatgtgtgcttttctgacccaaggatgatccagaagcagaagtccctactgtaaaattgctctcccaatcctgggatataattttgagcccagagaacaaacccatgaatccatgagaggaccgcaaagccaggtcctcagaacttctctgcagtcccaggagagcatcctgcgctcctgcccctgtaaatttcccttctttttccccgttggtacacattagacctgtgattctccacaagtgcacgggaatcactgaaaaccttgtcagatacagccagtatgggagggtaagattctgcatttccaacaagcccccaaagtgctcctctgatctcactttgggcagcaagaccccaagagggcataacgcaggactctgacattcgttactcagtcttcaaattcagaaattgcaaacaagcacccctagatatgtctttttgtccccatggagtatgagaggcagtgggagggcaggccttgtgagccctgctcacataagggactggaggagcactcaggcctgggggtccctgctctggctaccctgtgccctgggtctcccaaaacctggtctcctgctttccaggccctgcccagctcctttgcttgctgacaggttgaatgcctcctccttctccccagaagagaacccccttccactattccagtggtcaagatttgtttacatacaaatgtctaaacgataaaatggcattataacagtgtcaggactgaacaggcagaagccacctggaaatggggagacggagcgcagaacctgatttatccagtcaccatggtcctgaaaagctatcacacaaacaaaatgacatagatagctagatagagatatacagagaggttttttttttttttttttttttgagacagagtctgctccgtcacctaggctggagtgtagcggcgcgatctcggctcactgcagcctccgcctcccacgttcaagcgattctcctgcctcaacctcccgaatagctgggactacagacatgcaccaccacacctggctaatttttgtatttttagtagagatggggtttcaccatgttggccaggctggtcttgaactcctggcctcaggtgatctgcctgccttggcctctcaaagtgctgggattatgggcgtgagccactacgtccagcacaaaatgagatatatttgaagtacatattaaagtaaccaaaggaaataattttacagtaaaatcttacaaaaagctcaaaatcctggtgtaaaatatctaatcacctttgagcttagttctggtttatatccagcttttcatctgtcaattatattggaaaaagagaggcactgcccaggtctcaggagggcccctttggaggctgcaaggaacctccctttccccgggcgtgaagaccctgagccctgccatgcttggtctgcaaggctggcttccaggccagcacccagacaccactcccaaaacaggttttctgcagttttgggtctgcactctcaaaacagtttctgcacagcaagaaaatgcatgtagaagtggaaagaaggaaggcaggaaacagatacataaccactttagctctactggcttccccccccaaaaaaaacctagcttccgacctgctccgaatgacttgaggtgaaaatctacagaggctaaagagatgtccttgcaaaaatgctacttccagctctacctgctccagccaggccagcatcaatgtgagaggagagagagaaatcaattaggcaaatagttagggcaagggtccttggcagaattcccttctaacaaaaagcagcctaagaagtcgttgccctttcaggaaacacagataaggaaggcaagctctaacacagaaagcgggtcccctgtgtgacatacagacatatggtgggccccagtaagcacagtcctctcccttcttagaaatactcaagacacggccggccacggtggctcacgcttgtaatcccagcactttgggaagccgaggtgggcagatcacgaggtcaagagatcgagactatcctggccaacatggtgaaaacccatctctactaaaaaaatacaaaaattagccaggtgtcatggtgctcgcctgtaatcccagctacttgggaggctgaggcaggagaaccacttgaacccgggaggtggaggttgcagtgagctgagatcacaccactgcactccagcctggcagcagagtgggactccgtctcaaaaaaaaaagaaaaaagaaatactcagacacagaggcttgcatggcactgataagaagagctaccctggaccaggcatgtctaccttggagtgttcttcccccccaccacccaacctttttcacacatgcacagtaggaagaaataagcaacatggagtagtaactcaggctaagaagcccacatgtgcactagaaacagtggggcgggggactcagaaattcgcaccttatgtaaatgaagcacccctcccaccagcttttctataaaaacccttgcatttcactgtaaaatggcaacccatctttctgggacccctctctgatccagagagctttctttcttttgcttattaaacttctgctctaacctaccctctggagtgtctgcgtccttgatttccttggccatgagacccagaacttcagtgatatctcagacaatgaggcaggtttcactgagacacaagcccagggttctgcagaatgggagggccagcagctatcactgcgtgtgtgagggcaggcagaggaagtcactgtgttttaatagtccagcaccacgggtagagatgttgtggctgactccatccaaggttcaatttctttgtagtaatcatttcagaagttagagcattaacaggctcttgttggggaagaaaggttagtaactccatctcctgagcccttgctaaaaagctcagcttcctgaattctccaggctcaccagattgagagggaagcccaccctgctccttctcccaccgcaaggctgcctttgtctgtaaatgacagggaagtgggtgaggagggaggatggggacagaccttagggggtgggagtgtggctccccctcccccactgtatcacacctatttcacactcagatttatccacataccaggccttgatcacaggaagcccatctgccagccacagggaaggcaaatgccaactggaagccccggtttcttgcaggcgcccaggctgctctgacaggtacagagagacggagacaagcccatctcaccgagagcggcctagctttctgagtttggaccagattgtaagagataagggagaggaaggcttcagatagctatgaagagagctatctgacctccaagtacccttttctttaacaaaaaattagatctggctcttgtcaacattgacctcccacctctccataccccagcgcaaaggcagtaggtggatcccaccagcaaacagttttggattagctcatagttgttgtttttttaaaacaaattagttgccaatatttaaaaatcaggagattttgcatgcacctcagattcctgatttctcctgaaaaatcagaagaccagatcacattggacctgccattctgtgtagcaatggaggccagggctgagcaggggccgtcccctgcccacccccatacagcagggccctgccctccctaccccagctcctcctggcagcatgcaccttacctatctacttgatcaataaacagatcacttcaaagcttctcaaagtatccctctttctttttttctttctttccttccttccttccttccttttctctttctctttcgttctctctctctctctttctctttccctctccccttccttcctgctttttgttgttgctggtgttgttgttgttttttccagaaacgcagtctccctgtgttgcctaggctggtcgggaactggcctcaagcaattcttccgcctcggcctcccgagtagctggaactacaggtgctattccaagatggtgaaaccccgtctctactaaaaaatacaaaaattggtcggggtggctcacgtctgtaatcccagcattgcagaaggctgaggcaggtggatcgcaaggtcaggagtttgagattagcctggccgatatggtgaaactccgtctctactaaaaatacaaaaaaattagccaggcttggtggtgtcgcctgtaatcccagctactagggaggctgaggcaggggaattgcttgaacgagggaggtggaggttgcagtgagccgagatcgcgccattgcactccagcctggacaacagagcaagactgtctaaacaaaagctcaacaaactacctgccatccccaaaactaatctcacctcctaaagcattaacgacccttcctgaccaaatctaaactagcgcccagattttcttcccatatggctcagcccagctccgctgccccacaggtgtcctgtcaggatccgcttcacatttataatacctagcaccccacccccagccccgcccctgccccaccagccacccccactctaccccacccctacccatcacattccgcaccccacccccgccaaacccacatccccaccccacccaacctcacccactcccaccacatccaccacccgcaccccacccccacccaccacacccatgcctacgccactcctgggtgacagcgagccagggcccgggactctagtcccagctctgctgcttacttgtgtgacttcagcctctccatgcctcagtttctccatagggacaatgactacactaacagtgtccaccccggcaccgggagggccgggctcccggcagggcggggaccctctccccaaggcactcccgggtctccaggcctgctcttggggtgccccctcctctcgcggggcgcggcctgggaggcgccccgccccggctccgggcgctcctttacctgggggagcggaggtctacgcggcgcgctcggcgatcagacgcggctgcagcccgggcctggcaggccccgggctccccgcccagctccccagccccgcggagggtcgcgcaggccttggtggcggccccggcgctggccccgccctccgtcccaccttccggctgcgccgggccttccgggaagccacgcgccgggccagctcctggctccgagctgcgcccggccttagggggagccgggggtcgctgctgggcaccccctccccggtcctggcccaccccgccgctgtcaccggggccctggcttgggttgcgggtggcgtaaggagacgaggcgcccggagaagagtcctgggaaccgcaaggccgcgctcccgcaggcccagccctgcctttctcccacgcgcacgcatgatcacatccgggccccgcgcacctgcctccaggaccgcggggacctcccggagacctccctccctttggcctggaggacccctctctccccgcagcctgggcacagaagagagcacaggggcatctggaggtcaagggtgctgcgtcagtatttggtgaatgtgtgggccggagccagatttcctctgttccagagcctgctctggagcctctgggtctgggggttgcaaaaggagaagcaggttgggtgggactcgtaatcccagctgccagtgaggctgaggagggaggattgcttgagcccagcagttcgagcgtgggcaacacagtgacatcccatctctacaaataataataaaaattaggccgggtgggtgagtcatacctgtgacctacagcattttgggaggctgaagcgggaggattgcttgagcccaggagttcgaggctgcagtgaactatgatcccaccactgcacttcaacctgggtgacagagtgagaccgtctcttaaagaaagaaaaaaaaggaaaagaactggctttgctcttaggagtcttggatggggaccaaagctgaggcaaggcagcctcttaggaaggtgcaaagggcatgaggctggggttgcagaactgcctgggaatactactttattgaggcctgtggaaagctgtccctactcttgtcatgcaaggtctggccttgaaccatctcaaatccaaaagtggcttctggggggctctatagagaattaatcctaacaggaaccctgcaaagcaggcatggttgtcactgctatattacagatgggaagctctaaacacaggctgctctgcccaaggccatcctggttagaaagtttcagggcccaaactccagcctcggtctcggtatctcaaagtctccgcctgtgaccagcactctgcctgctttccagggtgccatgggcacccagaggacggacccttttccatttttaaaagaatggaacaaacgctcttaataccaagcttccccaggccttggctgggataaaacaaccccatttattcctgaatcggagcttttgcttgagtttgggtgactttcaagagggaaagtgaactgaggccaggggaactcagcttgctgccttcctggggcctgagtgtggcgctcccgtttctctgcgggcagctccctctggcggcacattgcagaactggcctgcagactcctcccccagagatagtggggaagagggcctgtgtagggaaagatgctgggagtgaaagaagcttcaaagtccaggccctccagagaaggcaagcatgtaagaggttcatgcagcccagcgcggtggctcacacctgtaatcccagcactttgggaggccgaggcgggcagatcacctgaggccaggactttgagaccagcctgggcaacatggtgaaaccccatctccactaaacatggaaaaatgagccagacatggttggtgcaagcctgtagtcccagctactcgggaggttgaggcaggagaaccgcttggacccggcagatggaggttgcagtgagccgagatcgcgccattgcatgcaaatctgcaacccatcagcctcctgggcctcattctgatacgaatgcaggcataacatgaccgcacactctgaaccccagagatggagcacacagtgcctcatgctcctaaaggcaactgcggcctcctgcacagtgagcaaggcgtgccgtggggtctcggtggtggcgcggaaatggcactggcccagcacacagcgatgctttatgctgcttacagtgacctagggaaagttcttccacgtctccgtgcctcagtttcctcatctgggaaatggcaacaagagtagtacttatcctatagggttgttctcaacataaaaggaggtaatatatatgaatctagattattcttgtttacattacagaatgtgaaaatgagcggcttctccaaagtcccatgagcctcatgggcccaaggtagtgggaaatccagttctacccccaccttgacaaaacattctcttgctgatgggcccaacaatgccctagggtgctaggtggtgttcacacggccagccagagtcaaaactcagacggggccagcgttctatgccctcactttctcccaaagctgagtgcaccagctcctaaaacttccatggctccttcaggctaaagccacccacctagaccagggctggatgatccgcaatgtgggccacacccaaaaaccctatagcttcttttgttgtttcttttttttttttttttttttttttttttttgagacggagtctcgctctgtggcccaggtgggagtgcagtggcgcaatctcggctcactgcaagctccgcctcccaggttcacgccattctcctgcctcagcctcccgagtagctgggactacaggcgcccgccaccacgcccggctaatttttttgtatttttagtagagacggggtttcaccgtgttagccaggatggtctcgatctcctgacctcgtgatccgcccgcctcggcctcccaaagtgctgggattacaagcgtgaaccaccgcgcccggcctgttgtttctttttgttgttgctttgagacagagtctcctctgttgcctaggctggagtacagtggtgtaatctcggctcactgcaacccccacctcccgggttcaagcaattctcatgccttagtcacccgagtagctgggattacaggtgtgcaccaccatgcctggttaatttttgtatttttagtagagacagggtttcaccatgttggtaaggctggtctcaaactcccgacctcaggtgatccgcccaccttagcctcccaaagtgttgggattacaggcacgagccactgcacccagcccaaacttctctcttctgattgatagtcatattggattaagagccctccctaataacttcattttaacttgattacatctgcaaagaccctatttccaaataaggtcacattcccagtgatggggttaggacttcaacacatctttatacaattcaacccttaataccaggtgtcttaatctgttttctactgctacaacagaatgccactgactgagtaatttataaagagaagatatttatttgcctcatagttctggaggctggaaattccaagatctaagggccacatctggtgagggccttcttgctacatgataagatggcagaagttatcacataaagagggagcataagagagggaagagggccacccttattcctttatcaagagcccactcctgtgatcacagcattaatccactcatgagggcaaagccctcatgacctcatcactgctgaaaggttctcctagcaatttgggaggccaatgcagatcacctgaggtcaggagtttgagaccagccaggccaacatggcaaaaccccatctctattaaaaataaaaaaattagccgggcatggaggcacatgcctgtaatcccacctactcgggaggctgaggcagaagagtctcttgaactcgggaggtggaggttgcagtgagccaagaaaatgccactgcaccccagcttgggtaacagggtagactccatctcaaaaaaaatatatatatataaaatatatatcgtataatatatataacatatattatatattatataaaatatatataatatataagtttggacaaagatatagaattatataatatataagtttggacaaagatatagaattatataatatataatataatatatcagtatatataattgtactattatataattatatataattatatatattatatatataattatatatatataatttatatatatataaatatatatataaattatatatatatataatatatatatttatatatataatatacatatttatatatatattatatatatttatatatatattatatttatatatatttatatatattatatatatattatatatataatatataaatatatttatataatataaatatatatatttatataatataaatatatatatttatatatatataaaatatatataatatataagtttggacaaagatatagaattatataatatataagtttggacaaagatatagaattatataatatataatataatatatcagtatatataattgtactattatataattatatataattatatatatttatatatattaaattatatatatataattatatatatataaattatatatatatataaattatatataattatattatatattatatatataatataaaaaataaatatataaatatataaatattaaatatataaatatgtatttatatattatatataattatatattatattattatatataattatatataatacaatattatatataatatttaatataatatatatctatctcaccacaacggccattgaatttcaacatgagttttaaaggaaacatgcaaaccctagcacgaagtattcaccagatgccagctgtgattattataatctgagcacgtgcatagtacatacatgtccacccatggcacaataaaaataacagccttgggctgagcatggtggctcatgcctgtaatcccagccctttgggaggccgaggcaggcagatcacgaaatcaagagatcgagaccatcctggtcaacatggtgaaactccgtctcttctaaaaatacaaaaattagctgggcgtgctgtagcgcgcctgtagtctcagctactcgggaggctgaggcaggagaatcgcttaaatctgggaggcggaggttgcagtgtgctgagatggccccactgcactccgcacaccagcctgtgcgacagagcgagacctcgtctcaaaaaaataaaaataacagcctcgggttaagcgcggtggctcactagtgtaattccagcactttgggaggtcacggtgggagaattacttcagaccaggagttcaagaccagcctgggcaacatagcaatacctcatctttacaaaaaatttaaaaattagtcgggcatggtggcatgtgtctgtagacccagctactcaagaggctgaggtggaaggatcgcttgagcccaggagactgaggctgcattgcagtgagctgtgatcgtactgctacacttcgccgggcaacagagtgagatcctgtctcaaaaaaatattaacagcctcgggccatgcctatgtcaagactgttgtgtgcagggaaaccatcctgccacctcccttcggtcttgggagagcttaatcctgaaagggttgtggaaggacaaggtggcttggggactggtaatgatctcttcccaggcttcatcactgttcttttaaataattaattcatcttcttccttggtgtttacatccttcaaatatttgtagatggttatcatgtccctttagtcaccacttagcaccactctgcatatttgctgtcatgttgagtgtgtgttatcatcattgtcattattattattatttcctcccagctccctccctcagtccctcagccaccatcatcactcagtgaatttcctccaggttcccaacctttcaagtaccaggttacccaagatgggacattaaaagtcagtagtgatgacaagccctacttgtcacagagggcttgcaggccctctggttcctcactaattctcatcagtttccccaaagccacagcaaaaaaaaaaaaaaaaagacaaactaagtaaaaacagcatgcttacactgcaaacacagcttccagacaaatcccccagcccctgctcccaaacagataatcctcaattttctcaaatacaaaatcaggatgagaatccctgctctcaacaacctgggattattgtgaggattcaaagaggaataaaaactgaaaggtgctttgtaaactataaaacagggagggtggtactatcagcaatgccttccacataggatgggatttctacaaaatgttccagaggtcaactgttctaaaaagctaaaaattctaagttagaatttacaaatgaactcgatagagccaagattcacccgaaaatctgtctattgaaagaatataaagagatgccctacttaaaaatctactcatagatgttagtattccaaataaagtgtggaactcagagctggaggctgatggggccttggagtttacagatggccctgacgagactttagaaggtcaagctgctataaaagacttaaaaaaaatccaccttgtcttgcatttcagatctcactgaagagttcttctgtgcctggaagacttattttcagtctgagaagaatgatttttcaatggttctgttgaacatgcaattctcacgcaagtatttctataattatcctgtttcagttataatacagtttctggaacaataggacttttattgtattgccatatctgttataatagatgttttattacagaaaattatggtagagtcactattatgattctgaagtttttatttcaaattgctcagaggatgcaaattctttctcccactagttttactttaaggcagctttgaatttggggtgggggtggtttgtcttttcttctattggagctttggtctgtttgaggttttgttctatagcagaatgttctctttcgctccagtgtacataaatgaagtcacccatggtatttgcttgtttgttagcctgtggtgcacacaattttaaaaagaatgtcacctagattgtctctatatatctgcaaaatttctttcattattgctggagaagtctccataaccctggtattaattttttttgagatggagtctcactttgtctcccaggctggagtgcagtggtgcagtctcggctcactgcaacctctgcctcccaggttcaagaaattctcttacctcagcctccctagtagttgggactacaggtgtgtaccaccatgcctggctaactttttattttttatttttttagacgaagcctcgctctgtcacccaggctggagtgcagtgacacaatcttggctcactgcaacctctgcctcccaagctcaagcaatttctggcaaatttttgtatttttagtagggacggggtttcgccatgttgtccaggccggtcttgaacgcctgacatcaagcgatttgccctcaagtgacccacccaccttggcctcccaaagtgctggaattacaggcatgagtcacggcacacggctgacaaactatattttgagaaggtaaatactagtgatcatgaaacactaatactagtgatcatgaaaacagaggagctgaaacttctaggcacattcaggctaggtcacatcctatttcaggtggtagctccaccttgaaaagcagggggctggagattttcttggttaaattagaggctgcagacacccgcagctgctagaggcagagctgggattcaggaatgggcttgctgactccaacagtgaaggtcttcccctccaagagaccccacccgtggggaagggtgaccctcaaatcttggacatcaggtccaactttcggcccagttgacttttccacaaaggaaggatttcagggctctgagaagtcccagaatatctgcccacagcaatctagcatcatcagaacccaccttcacgtgtagccaccgtgtctccatgttcctggtaatgcacgctcccaggctcagagtctggaactgctgatggaggggcgggttctgggccctgcaaagaaccgaggctccgcagtcacagtcttcgattagacagagcccctccagttctcagacgatttcttaggctaccccgaaaatagagagaggaagggacctgcccttgatcacactgtcagtaacacaatcagaacagaaatctagggctcttggccttcaagcctctgttcttcgcttaacacacggctggcagagatggggagacctgagagggccctgagggtgagggcatttgcactgggtgcagagcgcctttggaaggcagggaagtccaggaaggtaaacacacacacacgttgtaaatatggcgaaaatcagagaggaggaaatgtcagggactcctccagcacggaaaacatcctgatagtttggagcgccgggaagagtgggcaccttggaatctgcaaggcattcttttgcgtttcacctgcagtggggtggggtctctggggtctgccctccctcctactctacatgcattacccatcttatagccgggccgtccctgcaaaattccagctgcatgggggaaccacacttctgacttcagaatgaaaccagtgttttgcacacattcattcctcagtccccttgctgggacccttctctgttatgaaagcagagatcccacccgaatagggtgactttggggcgatggattacctttggcaggtcctgtgggtcaggaatttaggggtgcagcgtgggcccacagcatacccagtagccaaggaagaccctcccctacccgaggctcaagcaggcgccaggccccaaaccctcactcctctctggtctaaatccccgccgtaggattttatttttcggtgctgaggtgctttgctggaggagctgccagggggagctgcgcggggcaggcccggggtaccagaggcccttgctttagcggcggccctgcgtgtgccagaggcttgcagagtgatctgagcacgccaagagattgctgtcaagtaagctcctccacaaatctgcagaaacctcaaagattacagcgctcgcacggcaggagcgcagcggcttcccatacgccggcagacaatggggcggaggaaggaaggggacggtggcctggggacccccgcgcccgcagcacgtgcaccgagcctggagcgcccgctttacagatcttgtcgctccacccctaaaacaaaggccccggggccccatctgtgccgggcgcgggggagggcgccgcacttgctgcccgccgcgtgcaaagcgagccagacaaagggctcagccctgcagacgcgagcagtggggaaataattaagcactaaggaaatattgtatgtggatttgagaccaacgggaaacgcgctcccaaacaatgctcgttgtttgcaccgagccgcttttctgctaagtttcatcaagtaatttgcatgccatttcaataaaattaacgaattatggtcgagttttttgttttattgacctaaaataaaaatcttcctttcctttattattgaaataattcgccccccatcccccccggctcccatcctctgggaaggctgcacagcgcgccaaggaaatctgtcctcccagccagaccccagcggcctttctgctgcgctccacagctaactccccggaaaccctgcgtttattctggctgccccctttgactgtggcaataaatagaacttcaaccctctcactttcttatgcctgcttttcttacagtgaaagcaccagatttccgcgtaggagggactcgggggcaacgatgcaattggaaggtaaggggcttctcttaaagctgcatttgcaaagcgagcacactgtttgctaaggttttatattgcatcttttaaaaaagataatgtggggcctggcatcgtggctcacacctgtaatcccagcactttggaaggcctaggagttcaagaccaacctgggtaacatagtgagacctcgtctctacaacagatttaaaaattagccgggtgtggtagcctgtgcctgtagtctcagctacttgggaggctgaggcaggaggatcactcgaacccaggagtttgaggctgcagtgagctatgattgcatcactgccctccagcctaggagacatagcaagaccccatttctttaaaaaaaaaaaaaaagactaagaaatcatcactaattggtattattaaggaacaacatcagtatcactgtagttgttatttattgctgcatatcaaatgcaaaacttagtggcttaagaccaatgtcctctctcacagctcccaagggtcaggaatttgagagtgctgtagctgagcggttctagattgggccctctcttgaggctgtagtcatctgaaggggtgcttgggcctggtgatgtgcttcccagaggaccactttctcatgtggctgggctgttggccatgaggcctgagtgcctcagcatgtggggctctccacaggctgttccaatgtcctcttgatgaggaagctggcatcctccagagggaaggatccaaacaaccaagcagaagccacagcgtcttcatgatctggcttaaaggttgcacaccatcactgcaacacccctacacattcgtccatgtggctgggactgcacagaggcatgaaggctggtaggcatggatcactgggtccaactcagagactggttaccatgagtgattatcattaatatgatttggtagggctgttgcaagtgcctggaggaggagagtattatacagctaaagccatcatttcttgtctttctagtcaatgcaaacaaaagtggtcagttacctttaatggtattcccagacaacaaacatggactcagggccttcccagtgccagctcccccttcagactggggaatagaacagtagccaagagagataaggtccccttctggcatccctgacttttcagagaaagaaaacgtaagtgtatgcatgaacacagcaaccagagctacaatactatcgagacagtgctgccaaatgggaagtacaggccaggtttggtggctcacgcctgtaatcccaccactttgagaagctggggtgggaggatcgcttgaggccaggagttcaagaccagactgggcaacatagagagccgtcactacaaaaataaaaaattagctggatatggtggcgcacatctgtagtcccagctacacaggaggctggggcaggaggatcgcttgagtccaggagctcaaggctgtgatgaggtatgatcgtgccattgcactccagcctggatgacaaagcaatttaaaaaaaaagagggaaagtcagggaggagactaagctctgagtgccaaggttggaggtctgtacaccctggtcctccctaaattgcaaatctgaaatgtcccaggcattgcagatttcctgcaagccaaacctgttagtagaacaacagacaaaaaataagatttttttttttttttttttgagaaggagtctcactctgtcgcccaggctggagtgcgatggctgcgatctcagctcactgcaacctctgcctcccgggttcaagcaattgtcctgcctcagcctcccaagtagctgggattgcaggcacccgccaccatgccagactaatttttcgtatttttaggagagacaggatttcaccatgttggtcaggctggtctcaaactcctgacctcaagtgatccactcgcctctgcctcccaaagtgctgggattacaggcgtgagccactgtgcctgttttgatattgtcacactttcatggaataccaacactcccccttcccagaaggcaggctccacaagggaggaggctgttatgtcttatttatccctgtagctctcatgcccggaatgattggtacataattggtatcactaatgactgtcattaataataattatctaatggctatcagccttgttggtgtccccaagtctttcaggtttaatggacgtcccccttaacattaacaaataaaagtgatttaagccctcagtctacttacagtgaaacatgagaactacagatgaaatcctcagcgccccccaaccaactgaacagaccccctcttggccaaggggaccccagaggaaacttaaccacagagttcccagccatgatgggaagggaggtcagacacaccccgctctacccactcccttttgtggcttaaacacaaatgagcagcattcatgttaaaatagaggtcatggtggtcgcagtggctcacgcctgtagtcccagcactttgggaggctgaggtgggaggatcaactgtggtcaggagttcgagaccagcctggccaacatggtgaaaccacttctctactaaaaatacaaaaattagccgggtgtgtgggtgcctgtaatcccagctactcagggggctaaggcaggagaattgcttgaacctgggaggtggaggttgcagtgagccgagatcacgccactgtactccagcctgggtgatggactgagaccctgtctctaaaaaataaaaataaaatagaggtcataagactggcagaatggactctgtgacagtaagataccaaatcataaccaggacctaagggccatatcagggaagggttaagtcacacacccctacacttaaagaataaactagtttccagctgccgcaaggggtttctttttctctagcagctaaacaagccaatggcttggagataggtaatattaaaacaattgcagttcgcccgctgccagacactaactgaccctcgttccaccagccagaactgcagctttgattggacaagaggctgattcagtaactttctcctgataagagaccactgaccatggcctggttctgcccatttacagaggctgtgcaatgccttcatgtccctgattcaccttttgacgtctacagcccgattgtaatacacttaaatgtgtattctccactccaaggtgaacatgggatgtgtgtaacatgcatgtttgcttatcacacatgtgtatggcctccttccaagaatattcatagctcttcctatatcccgttgaatatgtatacctggccaacccattcagcttgaattcctgtcttatcccctcccacccttcctcaaagtgcctgcctattggcttctactggagactacacttcttagccagtcagggtggctgccttgcaggttgtaactctatatgagaaataaagccctccttttctaaatgatttttaattattttaaatgagtgatttttaagctagcagacaccagcccggaatctctaaaggttgctgagagaggtggtaagagccacctgtgcgtttctcctgatcaggagcctctaaagcctgattcttcagggttcgcctcctcgcctccctcctcagctcctccagccctccctctgttcagtgtgcctggcccaaatgaactgggagctccagaccttctcggggacttccccaaagtctctataacacaaggtgttggtgccacagactttgactgttgggtctacagtggccagtgagggttcaatgtagcggcgtggctcaccaggtgcctggaagggaatattgagacctcctggttcttgagagttacttgggcccagccaggctctcagcatcttacagggtctcctgctactctcttatctgtggaccagcctcttcctggactccttttcccatatcagggacaataaaacactcacccactccaggccacagcttttggggtccagagctctgaactaacaccttatgtttagtgaggtcaaatttttaggcttagtgcccatctttcttctacttagttttattttaaattattttttagaaacagggtctcactgtgtcaccccggctggagtgcagtggtataatcatagctcactgcagcctggaattcctggaatcaagtgatcatcccacctcagcctcctgagtagctgggactacaggtgcatgccaccacacctggctaatttttaaattatttttagagacagagtctccctgtattgcccaggctagtcttgaactcctggcctcctgccttggcctcccgaagtgctgggactacaggcatgagccaccacacccagccccactcttctaagtggagggaaggtttagtctgcccccgtaacgaattatgcaacactctttcccccttagaacatacaagcactctggtcaaagtttctgagattttattttaggagcatttttcattttggctaaacatagacatatatacccacaagactgccggttaaaacaaataaaatatcatcttgaggaaacaagcacatcttgagtaagtttctttcaagatgttttggtgcattctatgctatcactttgcagaacaatttgttgtccatgcggtaactttaggggctgtctgagatggtctgttcctaaaagactgtggatgggagaggtgacagtaaatcctggagagtggagtgaatcccagccattctgtggacaggtgggctgagggagaagttcagagggcactctagagtgatttgcaacgtctcaaacagaaatataacatcttctttcatcctctgcagagtctggagctaaattcacacctttttttccccttccctcacttaaaatcaaattctcgcccttaatacttcctttcagaactgcaccgaaaatgacgatgtcttctcatgcatatgaattatccaaagtgtaggaagatgcgcccccactggagtacgctgaagcctttaacccaagtacatttaatgctgcgaagccccgagtgaggcaaaggtgtctttttattttagaagacatttaggacagttcatgtcactctgcacagatgcactgaaattgattgtggggcaaactataaagagagcttatgctccccaaatctgtttccgagccaggtaggatgatgaattctgaggtgggactgagggggaacggtggcagctctctcccctgcacgcaccggccaactacttccccgtttggacattggcgtgacaccctccttccctgttcatctgtgaaaatgtgcagcgttttcatttaaaacctcctgctccaacatggggccttctgcagaccgcagggacccccaacaattacttgttggaagaacaaatgaagcataaagcatgatactttattttaaacatacaggtggcacaaatttatttccaaagatttaagcacctgatgacttctccttagagaaaaagcaataaaaggagcctcttctgtcacaaatttccacttagcatggtttgtgcagaggcagaatttcaggcttttaccactgagctctggacatgaagcaaagctaacactagagggtgctatagattaggaaatccagggaccatgggcgccggagcgcgttcaagacgctgccctcccgattgtaacctaacaaactgagcgtgtcactttgccagaatttaccccttcaccatttctgctatgatgaaattatccagatatgtttaatttgaaattttaacttagtctgtgattatgtggaatttcaacactggctgtggcccagtgcagtggctcactcacacctgtaatcccagtgctttgggaggccaagtctggtggataatttgtggtcaggagttcgaaaccagcctggccaacatggtgaaaccctgtctctcctaaaaatacagaaattagcctggtgcctgtaatcccagctactcgggaggctgaggcaggagaattgcttgaaccctcaggaggcagaggttgcagtgagccgagatcacgccactgcactccagtcctgtctaaaaaaaaaaaaaaaaaaaaaaaggactgagcccaggtctgtaggatagacactttgtgtttgtatcttaagtactttgcgatctcacccttacaaacctgatactaaattccacttacctacttcagtccttctctgagggaaggtggagtttggaggcaattttaggaagcaggatgaggaaacagggaaggtgacacagtgaaggacaagccaacacaagggtggattaccaaggctggtcccctctacaggcacccagggctcggtcccacgcggactgctgagtagacagaagacctttcagaatcttctgcctctcccccatttgctgagagttccctgggaacggtaacccccgtaccttcgggctgaacatatgtttgcatgctgaatgggctctttctgccatcccatgccacagcattcaggaagccctggggccaaagcaaacagcatgcttgaggcaaggtgctgtgaggcccaaatgagctgaagcttgcacaaaactgctcaccactgccatagctgaatcagcggaggccaggaggatgcgaggcggtgcccgtgattgtctgatcatctccctcttggaccgctgagactcaggcatgccctgcatcaaatccaacctgtcaccaggtcttcaagggggaggcctgcggaaatcctactgtgaatgaaactacagttgctattcatcgtctccctcctgcacctaccactccagatgtccctcactcttggccagcactttggcttgtttaagttgtgtgccaggtgaggtgaccacaccttcccccctgcagtttctgagtctttcctgagctttgtcttggttggcccttggctgctgtgactgcctattttatctaattgcaggttcaagattcaccaagaaggcagggcgcagtggctcacatctgtaatcccagcactttgggaggctgaagcaggcagatcacttcagcccaggagtttgagaccagcctgggcaacagagcaagaccccatctctaaagaaaaataattattcaggtgtggtggcacatgcctgtagtcccagctactcaggaggcggaggtgggaggatcgcttgagcccaggaggttgaggctgcagtgagccgtgattgcaccattgcactctagctgggcaacagagcaaaaccctgtctccaaaaataataagtaaataaataaataagatactaagagacagcccagtgactctcctgagtcccaaacatactcatccatccctcatggagaaacaactctatctccttgcaataatcagaactagtttctcctgccagtttaatcagtactttttttattgcagtaaaatacacacaacataaaatgtgccactttaaccattttattattattattattattattattattattaagacggagtttcactcttgttgcccatgctggagtgcaggggcgcgatcttggctcactgcaacttccactttctgggttcaagcgattctcttgcctcagcctccggagtagctgagattacaggcacacgcagccatgcccagctaatttttgtatttttagtagagacggggtttcaccatattggtcaggctggtctcaaactcctgacctcaggtgatccacccaccccttggcctcccaaagtgctgggattacaggcgtgaaccaccatgcccagcccattttaaccatttttaaatgttcattcagtggcctgagttatatgaacattgctggacaaccattgctactatgtatttccaaaactttttaattgccttaaacagaagccttgtaaccattaagcaacacctccccatcccctctcccctcagcccctagtaatcactagcctactttctctgctactttgtctcttgtagatgtttcaaacaagtagaatgatatgatacttgtccttttgaaactgacttattttacatagtatagtgttttcaaggtccatccatgtggtgcatgtattaaagcttcatgcacttttatggctgaataatgttccattgtatgtacaaggcgtgccacattttgttattcattcacctgttaatggcaacttggcttgtttccacttttgggcccttgtggataatgctgcagtgaacatcagcatggatgtctctgagtcctgctttcagttcttcagggtatatgcctagcagtggagtagctgattctatgttaattctatgtttaattttttgagaaactgccatattgttctccaggctggctgcaccattccacattcccactaaccgtgcacaaagattccaatttcttaccaacacactctcatcaatacatgttatttttagtttatcgtgttttcatttttcttttattaatatatagcaggcattctaatgggtgtggggtggtatctcattttggttttgatctgcattttcctagtgtttagcgatgttgagtatactttcctgtggtcatttgtatattttctttggatgtgtatctgttcaaatcctttactcatttttaattgagttgtctttttgttattgagttgtaggagttccttatatattcttgattttaaaactttatcagatatatgatttgcagatattttctcccattgcatcggttgttttttcagtttcttgataatgtcctttcatgcacaaaagtgtttagttttgatgaattccaatttgtctctttttctttctttgctcatgtttttggtgtcgtatctgagaatccattaccaaatccaaggtcgtgaagatttacctatatgttttcttgtaagagttctgatgtttgtcattgatccatgctgagttaacatttataccgtataatgtaggggctacctcttcattcttttgcatgtagaaactccgttatcctaattgttgctaattgcctctggcccactgacttgagaagcccaagaggaccagggagtatttgtattttcaagttctgtagaattggtgatgttccctggtggaggagtccactctccgctcctcctcccccatcaagaactaagacgtcgaatttgctagagccccacccaaagctgtggacacaggaagcacacatttctcaaggtggtctctgcgagtgatggtgagagcagccgatctcactccccccgccaccccctgggtttccagccccatgtctttctgcttttgggatcatagcaccatgtgtctgctcttggtaaggcacgtacaccacagtttcaaggatagtatcccaattatacagggtgtgggctcacgctttcaccctggcatagccttggcacaggtcatcctgatgttcttgtaggcctgctgcttccagaggaaccttggagccatagcttctttgctgtaaaacagaccccttggcttgaggcagtgttgttcaaatcccctgccaataaatcagagacgaccgtaagtgctctgttggtgatgccagtgaaggcactgttgcaaggaaggaaaatccatatccagagtcggtgttcactctgctaggactcatcgctgtctcatcaatgacagaaggggtctcatataatgaactttgcactgtgactgcctgatctccttgtgaaatggtgccatcttgagggctcattattagtccatgtggttggcaggtagggcattcagtagcggcagcagccaggtcatctctagcaagagggaacttgtgttgggctcatgcctcccttgacttttgccaccatggccacaccattcatggaactatctatttcccctgccgtggggtggctgatgctggctgatgcccagaggatgaaccatcctgtccacccagttgctaggtgcctcctctgcaggagaggctttttggcagaccttaacgtaagtccaatgattggcacgctagtgccatttccataggtcagtagtactgatttttccttttgtctcagacaccaatatggctcggcacagcagttactgatcctgtctctatttgaaattttaatattttgctcatcatggatttttgtattaattttaactctttaaaatattgcattaacatattatgcatcttcatgttattattattcctcttcagcttcccaaagtgctgggattacaggctgagccactgtgcccagctcaaatgcattattttcactgctgatgtgttgctgttgtgtcctcccaatctatggcttaatgggtctcactgtaatcagttccaggaacaaagtcactcactgtcctgtgggtagtctccgagtctctgcgaggacccactgcacggcaggagctagtctcagactgaggtgagttctcggcagcagaaggcaccaccgcactcccaagggctaaaggtttaccctgcacctctcctactgaagcttgcagagggttggcatggcagccttcttcatcataggagactctaagactgctacttttggctcctctgggttgtgcagcttgagtggaagagcagatcctctcacagcctagacctcctggccagccgtttcttgccctagactccactccgagtggcagtctcccaagctgtctaataggcgtatgggagaagtatcagcaagtatgctacttctaatgtcccaggtggtgcacccagcactgtgcctcttccctagtgcagctgaaggaaagctgccactgcctgtgccttcctttacaagggttgtcctggcatgtgtcagaccactgggtcccctaacaaccttgccaatgtgccagtcctctgaatgtttctgggctttagcccctgcccttggcttgcacgtgtcttcttcctaggacatccggggtgcttgtgtcatatgctggtagcataatgtcatcaacagtgcaccagtgtgctgtgcaaactatcccgagacagcctgtatgcatgcaaagtatgctcaaaagtacccaaggccgaggcgtggcagctcatgcctataattccagcactttgggaggctgagactggtggatcacttaagcctaggagtttgagactagcctgagcaaaatagtgagaccctatctcaactgaaaacaaaaaaagaaaaagaaaaagaaattagctaggtgtggtgatatgcgcctgtggtcccagctactgggaggctgaggtgggagaattcattgagccctggaggctgaggctacagtaagctgtgactgcactattgcactccagcctggatgacacagcaagactctgtctcaaaataaataaatttatttattaataccacatcaatcggtatttcccgattttcataattgaactgtggttgtataagagaatgcccgtggccaggcgcagtagtccctgctacttgggggttgagacaggcgaaaccccgtctccactaataatataaaaattagcaggtcatggtggcacatgcctgtaattccagtactcaggaggctgaggcaggagaatcgcttgaacctgggaggtggaggttgcagtgaaccaagtttgtgccactgcactccagcctggacaatagtgtgagactccgtctcaaataaaaataaaaataaaagaagttgcctggcttagttgtgcttactggactcagagccccacatggagtctgctgacctgtcttgggattgaagggtgataggtgagaaggatggagaatttgtaaagggccggcagtctccctgatctgtctcttctaattttgtagtcggactcctcctatttggttcctgggcgaccttcagttcttgaattttagggttccaaacaacaagtgttaagtgaagtttggggccttttaaaaggtgtcagtgcttgaaatttgagacaataataatagctgccatcttacggtgagtttgtcagctctgggttgtgaattttatgtctgtgactgcatctcatctcattgatgtaaaaagtaaaattagttttgccaagtactgccttcagtcattggaggttggatttccctgtttccaactcttagggagtctctactggggccagtgtgtcagcatcaccttggccccttctataccttaatgccctcgctgaagggtaagctgggatccctttggccccacgaagcattaaagccttcatgtcctctcatcaacacaccccattccagggcttctgtgcctccccagcctccatgtcccgtccccggggcctcgagagctgctgatgcttctctacaccccctcagagggctgcagggaactggggtgggtgtgcccctgtctttcctgcccaggctaatccgcctcgcactcccttccagcctcctggcttgggacatttcagtgtcctccacctttataccaaagactgtgcccctgtcactatatccatgtcagcctctaagcccccggctcccaggaccacatgccaggccctctgatgagctccccagccacccttctgtaagggtgtgcaggtcctgagcacagcaggcactcaggctggaataaggtatggggcacctcttcccgacggcaccctcagtctctgcatgtggctctctctactggaatttgggaggccagggcaagcatctcccttaggctcccccgacagcatggggagacctcagccctcccaccagcctgagcggtcccaagctcagccgctagccacaagccccaggtttgctgcccaggcccaagctacccacgggcagtgagaaaggtaccatctcccagaatgggaccctcttgcctgtgtggtcagtgccctttctcctggatacagaccttcctgagcagccaaaacttccttctcgcccgacgggcaaggagacctgaggattaaccgcatgcttagcagcttcctggaggcccccccttggaactggaaatagtcctggataccatgattgaagcaacttcaggctgtactgagcccacgcctggctctggggttgccctcctctgcacctcctgtctggtcacctcttgcttttcctatgctatgcagccaagcaggtgaccaggaaggcctctcacccagaagccacctggctcctgctacccactgtgcacttgttccaggtgcattcccaagggccgacttccttggttcattttgacaaactttgaggttgctcgtcatagcccttaagaatggagacaaacaccctccctcccccattttccaacccccgatgtacacgggcaaaaaacagaagctcagagagggtgaggactttccacagagtcacacagctggtgaagtcgctggtctaagcctttaactagggccaacttgacccttcacctgcctgccttttcccacccctgccctccctacaggtgctgtctgcatgtagaatctttcaggcccagattcaggatgtccagctgagtgtgggaagggtggtgtggtatgggcccagccacatggtagctgaaaggctctggggccagggggtcctagctcccagccccgccccttagagcctcaccagggactcaagtctattgacacaagggccagcacctgtcacgaggtcatcttccctaacatatactttcatttaggggcaaagaacttctctttttgttattttgcattaaaataaccaagattcatccagacgtggtggctcacacctgtaatcccagaactttgggaggctgaggttggaggattgcttgagtccaggagttagagaccagcttgagcaacatagtgagactccatctctacatagaattttaaaaacttccaaagaattaaaaaatatatattagccaggcgtggtagcatgtgcctatagtcccagctattgcgaggctgaggatcacttgagcctgggaggtcgaggctgcagtgagccctgactgcactactgcactttagcctgggagacagagtgagaccctgtctgaaaataatcaagatcaaccctggacagaaaggaattgctagagtaataccctttgacctgaaatgctgtggggtctaaggtgctgccttcccctccgccctgtgtgctagtccttgtatgttaagactcagtagttccccgtatcccagtaaaaaggcaggggtgggatgatgggtacactaaaatcccattccccaccagcacacaatatactcaggtaacaaacatgcgcatgtaccccttgaatctaaactaaattaaattttaaacaaacgcaagggtgtgacctggatggagtggtacagtcatcccctggcaccaagcagcccattagcccagaatggttatctgatcagatgcctgtctcctatggacctatgggagctggacacagggaaggagcctttgatgccgtggaacaaggtggaggaattgtccatgcgaagtggcccctgaagaactggtacgaaggggttggctgcagtggtttgagagtcagggactgggttgggggcctgggcctacaaggctttctaagccccctaggactggggactttgtcctggatgctatgggaggccactgaatggggtgggataaggggcaggaaggatgggtccacaagaaaactgatcagagtgacttttttttttttttttgacacaaaggcttgctctgttgccaagctagagtgcagtggtgcaatctcagctcgctgcaacttctgactccctggttcaagcaattgtcctgcctcagcctcccgagtagctgggactacagttgcgtgccaccacgcctggctaatttttgtattttcagtagagacagagtttcaccatgttggccaggatggactcgatctcttgacgtcatgatccacccacctcagcctcccaaagtgctgggattacagatgtgagccacggcacctggcccagattgacttttaaaagcaggacccagggccgggtgcagtggctcacacctgtaatcccagcagtttgggaggctgaggcgggcagatcacttgaggtcaggagtttgagaccagcctggcaaacatggtgaaaacccgtctctactaaaaatacaaaaattagccgggtgtggtggcgcgtgcctatagtctcagctactcaggaggctgaggcaggagaattgtttgaacccgggaggtggaggctgcagtgagccaaaatcacatcactgcactccagcctgggcgaaagagtgaggcttcatctcaaaaaataaaaataaaaataaaaaatgaaataaaaaattctggccaataaaacaacaacaaaaaagatcctggaacccttctttctccttcttgctccctctcttgccacatgacatgcctgctcctccttccccttctgccacgaatggaagtttcctgaggcctcaccaggagcaggtgctggtgtcacgcttcttgtacagcctgcagaaccgtgaactaaatcaacctcttttctttttaaatcactcagcctccagtatttctttatggcaatacaaaatggactcagacactccttgatctcaaacgtcccagctttcagaacggtgaagcataactgttcattgttcaagccctggctcatggtattttgttatggtggcctgagctaatacaggaggccggctgggggcctggcccttgagagatgggggaggcttagagcacagcggcaggggagtagggaagaagcagacagggtagaagacacattctgtagtgacagacccactcactggttatggtctggagactgggatggaagaaaaaggacctcaggaatgactgccaggtttctgggcttgagctacaggggaggtggagacactatgtcctgggcaaggagttttgttgtggaagttccagctctggagcactccagcctttagaggtctggttaaggagaagcccaagaggtgggaggaagacaggagggtggagagtcactgagactggtgcacagtgtctccagaagcacggagcaccccctttcaatggcaacctggctttgtaggacttttgacacgcttacccccaccggctttccccgcgcctgcatggcctctctaaccatccacatccatggtgagggtccctcccttgcctgccattgctccatccacccagtccccaactcggtagatttgtattgtgtccatcctttgaggctctcctccactcccccagctcctgtctcagagtcccccagcctcttgggtccccctctgtgtcttgtgtaagagctgagtgtgctcttgtctgtttcccaggaggtgagctcctcacgtacaggggtcgcgctgcctcctcctctgactccctggctctgagcgaaggctctggcatctgtagccatgagaggaatgtttgccgagtgaccccatgagcgagtgatgccagcataaaggccagtgcacccaaggctggcccaaaatatcctctggcaaccagagccgccccgccgggggatgcattctgcctttgaaagtagtgagtagcacatccttacaggtacccaagaggagaaggattggacactattcagggtggaaatggatgaggggatccctgcgatgggggagagggtctgactacccatcccctaaggacagtccctggtctggggcctcccagcctgagaacgaggcaggagccaccaccatcggaagctgtcagattcacagtcataattccagagtgtgacacttagttaatctgaaaatatttgctaacctattatgaataacaatatttgcagcttaaaatgcttaccctccatagctccagagtgtgaagatgtgcttctacccagacaaagatgtactcactactatccgagcaaattgacacagggagcttatgagcctaattgttggcatctcaggctgatttgcgtcccctggggccactctgataacttggctaaacaaatacaggaggtgctgtagggacaggctcacagggccagagggctccatggagccggatgacggggaagtatttcaggcctctcaccagaacctcctgctatgctctgaatgtctgtgtcctcccaaaattcatatgttgaaatcctaattccctacgtgagggtattaggaggtggggcctttgaaggtgattaggtcatgagagcagagcccacagtaatggggtgagtgcccttatataaaggaccccaggctggttgtggtggctcatgcctgtaatcccagcactttgggaggctgaggcgggaggatcacttgaggccaggagttcaagaccagcctgagcaacatagcaagacctcatctttaaaaatatatatataaataaataagtaaaaaggatatcagagagctctttgccccttttctgccatgtgaagatacaatatgaagtctgcaatctgtaacctgagagatggggtttcaccatgttggccaggatgatcttgaactcctgacctcaagtgatccacctgtctcgtcctcccaaagtactgagattacaggtgtgagccaccactaaatttctgtttctgataagccactcagtctacggtactttgtcaaaatagcctgaacagactaaggtacccccctcaccccatctcatcacagagtctctggactttttttcttggctgcctatatggttcttagggtcatcttcacagtcagctacggggtgtggccaggccccgtgggtatgtggttaaggtcattggctaacatggatgaccaaggccattgcagttcccagacactgagaggctccacacacttgtggatgggggtctgtctttcctgaggaagggtcaatggccagctcgaggctgtgtccacagataaagatgtttgcacagaatgtggagcccagaggagacaaggatctatcaagggcctcccaggagcttgtgccagaatgtgcaactcaagccagtgttggcatgaaggaaacttggcgtaactgcagagaccacggcttcttcagagcctcacatctcctgtgttggtgccatcgcagctgcacagcccccagccctaacacccaggacacctgaagcaagagccctttcctgtggctccagctgaaatccaggggcccctttctctccctagcccaattcatgccccctctaaacctttgctgtggccagggtttagagggggcattgctggccccacccaagaggcaaggtctgaaagtggagaaagacggattccccaagactagctgggatgctcttacaagaatgacagaaaagagatgctggggctggatgcagtggctcacacctgtaatcccagcattttgggaggccaagatgggtggatcacctgaggtcaggagttcgagaccagcctggtcaacatggtgaaaccccatctctactaaaaatacaaaaattagtcgggtctgatggcaggcgcctgtaatcacagctacttgggaggctgaggcacgagaatcacttgaacccgggaagtggaggttgcagtgagctgagatagtgccactgtactcccactggggcaacagagtgagactccgtcgaagaaagaaaaaaaaaagaaaagaaaaaagaaaaaagagatgctgggcaggagaaaagcctcccttgagggaaaagagaaggaaaggaccaactgccttggcccattcagtgatctggccatgaaaccaggggctggctgaaatgtcattgtccaagaaaaggtgctggctgtgcacagtagctcatacctgtaatctctgcactttgggaggttgaggcaggcagattgcttaagcccaggagtttgagacaagtctgggcaacatagcaagactctgtctctacaaaaaataaaaaaaagtagctgggtgtgatggtgcacacctgttgtctcagctactccaaaggctggggtaggaagatcactcaagcccaggatattgagactgcagtgagctatgattgcaccactgcactccagcctgggcaacagaacaagaccctgactcttaaaaaaaattttttttaaaaaagagaggtgctggtgaccatgatagacagcgattcagagcagagagagaggaggcccaaatagcttagtcctgtccacagtggcagaggaaatgggagaattaaggcaatttcaatgaaaacaacaattttaaaaaaaatgccccacccaatgcttatacctcaattatctagatttgctcaagcaggaattatcagaataacttaggaaaagcttcttttgggagtaaggacaagagggcaatcgtggccaggcacggcagctcatgcctgtaatcctagtactttgggaggctaaggtgggtggatcacttgagatccaatcatttgagatgaggagttcaagaccagcctgggcaatagggtgagacactgtctctactaaaaatacaaacaattctccaggcatggtggcacatgcctgtagttccagctactggggagcctgaggcacgagaatcacttgaatctaagagcctagatggtgccactgcactccagcttgggtgacagagcaagatctgtctcaaacaaacaaacaaacaaaaaaaaccaaaggatgactgacctgtgtcaacatccagagttcccatctcagctatgtgcacaggaagggccagtctttctcctttactctcattcactctacagatgcctaccgggtacctgccaggtgggccaggccctgttctcaccactgctctgaatggtcaccacagagaatggtctccctcctctcagggagcccatgttctgcttggggaaggcagccaacaagatctaaagcgtcgctgagtgacagggacatgtcctgtgaaatgcatggagaggtgatgttgtcattgtgtggacgtcacagagtgcactacacaaacctggatggggttgcctactgcacatctagactgcatggtgtggcctgtggctcctagaccacagacccagacagcacgttactgcgctgaatgccgcaggcagctggaacccagtggttaagtatctgtgtacctaaacaaatctcaacttagaaaaggtacagtaaaaatatagtattatcattgatgggaccactgtcaccactgcacactgcctttgacccaaacattattcggtgcatggccatcgatgatggagattgcgattcgtgtactggagaaaataaagcgaggtgggctgagagtgggaggcccgcagggcagggcactttggatcaggttgtcaggaaatgcctccccgaagagggcgcatttgcaattaaagccaagtgacaagaaaaaactgccatgcacagatctggggtctagagggtggggcaggagggacaacaagagcaaaggcactggggacggaagggcttcatgggcagtgggagccccacgggagccccctaggtctggcttgcaagctctctggccctctgctggacaccccagagcaagccagcccctgcctgggactccctgaacacactgcccccagagaaccacaggcagagggactggctcacctgagttccacaggaaagacagactgtcctgagaacagacactcgctcattttcatcactgttcctcaaacaagtagattttgttttaaagcaaacaaataaacagcgttgtcaagttggtcaagtttgttgtttcttacccaaacttcccctttaaatcttcggcaggacagaggaggaccctgggcttcttgtcaattctctgacttcaaggaagagtctgatcaacccaggctcactcgcaggcttgaaaggggcctctagcgaggccagggtgggagcagagaccgtaacaaggcctttttttgttgttgttttttgaggcagcatctcactccgtcacccaggctcaagtgcagtggcacagtctcggctcactgcaacctccgcctcccaggttcaagagattctcttgcctcagcctcctgagtaggtgggactacaggcccatgccaccacacctggctgatttttgtatttttagtagagacggagtttcaccacgttggccaggctgctctcaatctcctcacctcaagtgatccacccacctcggccccccaaggtcctgggattataggcgtgagccaccgcgcctggccatgtatcttttttgttatttgtaattgtcacttgtctagtgttttggtgcgcacatttacagaacgaagcctgctgaaaagctttaaagtacagcacactaatgattcctgagatataggtataggtctctctctctccccgtttgtctgtctgtctatctatctatctatctatctatctatctatctatcatctatctatctaatctgtcatcgagagagtgattgtagatagaggcacagatacagatacagaaactggaagctattttctgaaaatagagtggcatccaccactgtggtccatggtgatgcagccctgcgggtgggtctggggacattagcaggcagggcaggaagagtctgggagccagggagccttccccagacctctagcatccacccccaggcttttccactgcactgtcgacactgaaggtcaagttatgccccagactcctactgctggaggggcttgggccatattcccagggccagtgaggccaggaagccagtacttccgttagctaagaagtcaccaggcacaggaccccaaggctcaggggcactcgccagtgatggctgcagggaaggtaggagacgcacagcagcaggccactgggccgggctcctataccacctggaggagatgtgacagcctcacttccaggagcctggccctggccagcagcgtctgtggtcctttggcaggcagctagatgtggccactttgcaggtggcctttcatagcacctagaatgcccctgctcactcatctgtgaagcaaggacgccactctcactctgcctgtcttgctgtcactcaacactcaacaggcattgggcacggtggcttacacctgtaatcctggcgctttgggaggccaagtcaggaggatctcttgaggtcaggaggtcaagaccagcctgggcaacgcagtgagacgccatctctaccaaaaaataaaagtaaaattagcctggtgtggtggtgcacacctgtagccccagctgctcaggaggctgaagtgggaggattgcttgagcccagaaggttaaggctgcagtgagctactatcacgccactgcactccagcctggggacacagtccgatcctgtctcaaataaataaattaattaaataaaagaaaaaataggccagacatggggctcatgcttgtaatcccagcactttgggaggctgaggtgagtggatcaggcacccgtcacctgaggcccaggcatgaggcacccatcaccacgcccagctaattttctatttttagtagagatggggtttcaccatgttggtggtgggctacgttcccagggccagaactcctcacctgaggtcatgagttctacaccagcctagcctggggtcagattgcttgagtttgagagagcctgggcaacgtggtcagaccctgtctcaaatttaaaaaaataaaaataaaaaacattcaacatatatgtttggagcacctactatgtgccaggcctcaaggtcatgagaaacaaaggtggatgaatgattcgaagacccgcctctggcctccccagcactgacagggtgggcttatgaaagggcttctagactgctcaccggcctgcacgtgggacacggaacctcctctgggacatggagcctactctgagggcagagattgagcatggtttacagcaggtgtgccaccctccaagccagaacagggcctaatgaaaatcccatgctgaaatatttctgtattttgtaaggaatattcagtgtcacaagaatgtgaggctgtggggtcagatcgtttcatccagcttctggcacaattcagtgttcttgggggagacccgggaggtttaggaatagaaaatggatgggactggctgggcgcagtggctcacacctgtaatctcagcattctgggaggctgaggcaggtgcatcacctgaggtcaggagttcgagaccagcctagccaacatggtgaaaccccaactctactaaaaatagaaaagtagctgggtgtggtgatgggtgcctgtaatcccaactactcaggaggctaaggcaggagaatcacttgaacctgggaggtggaagttgcagtgagctgagattgtgacattgcactccagcctgggctacaagagcaaaactccatttcaaaagaaagaaagaaaggaagaaaggaagaaagaaagaaagaaagaaagaaagaaagaaagaaagaaagaaagaaagaaagaaagaaggaaagaaaaagagagagaaagaaaggaaagaaaagaaagaaaagaaagaagggaagaaagaaagaaagagagagaaagaaagaaagaaaaagaaagaaagaaaaagaaagaaagaaagaaaaaagaaagaaagaaagaaggaaagaaaaagagaaagaaaggaaagaaaagaaagaaaagaaagaagggaagaaagaaagaaagagagagaaagaaagaaagaaaaagaaaagaaagaaagaaagaaagaaagaaagaaagaaagaaagaaagaaagaaagaaagaaaagaaagaaaatggataggactaaaccaacttaaaggtctttttggagtccaaagattctccaagtctcacccttctttccctgtccagaaaggctgattccagccaggtgtggtggctcatgcctgtaatcccagcactttgggaggctaaggtgggaggattgcttgagcccaggagttgaagaccaacctgggcaacatagggataccccatctctatgatttaaaagataaaaataaaaatgctggttcctgatggcccaaccttgcctgttcacaccagctctgggcctgtcccccatggaccaagctctggattccttgaaggccaccagtctccagcctccagtccagggtcactgttcctaagggcgtgcccagcctgaccagatcctcatgtgagggaggcacagggacaatgttccaggatgggcccttatgcctgctggtgatgtcagtgacaagcccagggctcagcctgcctctgtgtccttctccaggtgggtttgggcagcctggaccagagggtgcaatgagcttgtctgaccccatctgtgccgggagggcgggggcctgcattgtaagtctggccgtgggggccctcagtttctgtcctgtatttttacattctaattatttcatatatggccttctgatggactcatttactgggaagctaaagatacccttcaatgtctaaaaataaacctgaactgctaaaaattcagcatttctctccctcgcttccaccagctgggcctgtctgcttttactccaacaccatcaggagctacaaacaagatttacaaaagccagcaagtttacacgggcctgaatagcagattctcttttatcttcaatttgacaaaacattttggggttgttattattgaggctttcttttcttttctttctttctgtcctttgtttccttccttccttcctttttctttctttcttttctttctttctttctttctttcttcctcttcctcttctttcttcctttttctttctttctctttcttttctttctttcctttcttcttccctttattctttttttctatcacttcttctgctcctttagtctagtatttaggaaaactttcgtccaaatgcaagcttccaagatgttctccctctggtctgccacacctccttttcttacttcaattattttaagacactctcccaatttctatgagtaccatgcggatggcctgaaggccagttaagaataaacctgctaaaccaataaattacattcactcttatttccagaggaacgcttttacataaatatctgccatagaaataaatcagataaattaataagaactccctcctctcctcaaaccaaacagtgaacagtaatggttatcagaccagttaaaagaataaacctattaaataaataaatttgctctacgccaatttatgtcaccaatgtacttaaggggaaaccttttaaaagagtagatttacagtgcacacacagatctccactgggtatgtgtaattatgcataagaaagacattacttttaaagtggatgaatgggcgatacttttttgatttactgctagaaacagaaaaatggtaatggcatgaaataagcgtttgcaaacccatttcggaagacaggaaatgcttgatttacctagggcacccatcaggttctgtatttcagatcaaagtagataaatggtaaggcaaatggatatttggggggaaatctatagcctttctgtcaactctgcaagttaaatgtttggaataaaaacgcagagagtgtctatatgcaaggaagaagtcatgatttattagcaatcgggcaaatggaagtgggcagtgcttacctggaaggtgaggatttctcagatacgagggctgtgggctgtgtccacaattcctgatgtttttagctatgaaatctggtggccagctggtccttctcacccaccccaagccacctaacagctgccctgaatgctgttcttgttctaacctcttacttgcactttattttattttatatttatttttattttttgagacagagtctcgctctgtcgcccaggctagagtgcaatggagtgatctcggctcactacaacctctgcctcccaggttcaagcaattctcttgcctcagcctcccaagtagctgggattacaggcatctgccaccacacctagctaatttttttttatttttagtagagacggagtttcaccatgttggccaggctggtctcaaactcctgacctcaagtgatctgcctgtctcagcttcccaaagtgttgggattacaggtgtgagccactgcacccagcctcttacttgcactttaaaaccctgcctgcgacaccacccatcaaaagaaaaagatggacgctatttaaggtggttggacattgttttcatggaggctacatggagctacgggccctagtcaatgtcatgtctgagcctttgttgaacaccaactgtacattaacctgtgttggttatggctcacagtgttctacaagatcttcatacaagtcagtatcttccaaagcagagagtaatgtctacacacaaatttacccagtattccaggagccacatctacactcaaatagagaattgaaagtggagcccaaggctgggcacagtggctcacgcccgtaatcccagcactttgagagcctgaggcgggtggatcacttgaggtcaggagttcgagaccagcctggccaatacggtgaaacccattctctactaaaaatacaaaaattagccaggcgtggtggtgtgcgcctgtagctccagctacttgggaggctgaggcagaagaatcacttgaacccaggaagcagaggttgcagtgagctgagatcacaccactgaactccagcctgggtgacagagtgagactctgtctaaaaaaaacacaaaacaaaacaaacaaacaaaacaaagacagtggatcacaaatcttgcgttcctaaatgcaaccctcccttcctgaattaactaagccatcttagcaactatatcctctgtgggttttacctgtttggacacagggacatgtgcccagagtcaaagttaaacaggttgggatcatggccccaatttttttttttttttttgagacagggtctcaccctgtcactcaggctggagtgcagcggcacgatctccgcttactgcaatccccacctcccgggctcaagcaatcctcctgcctcagcctcctgagtagctaggactacaggcgtgcaccacatgcccagctatatgggccagatttccatctcagctctgttagtctctagctagatcacactttctctccaagtctcagtttccacatctcccaaattggtataatcatctctgagcctgtgatggttaaatgagataatatatttaaaaaacttaacaatgttgcacagtcagtaaatagtgacaattaccgtgttgcttttttttttcatcatcagggagaaatgcaaagagtgctgaccaggtgacgggctaggtgcccagccctgtgctaggtgctctgaggactgagagatggaaaccacagggctctgcctcagggaaattacatttgctcttgtacacgagaaataggaaacactaggtggtatccattattgccacagcagctcagcgagaagggatgtgagttgagccttgacttgcaaggagagttaggataggcagagagaggacattccaggtgtaggaactgcataggcagagggctgggggcagcctctgggaggtggaagggagaagtgtctctggaggtgaagatgtggggagggtcagagagctacggccagaacacgaggagccccggggactgcccctcagaaggtgctctcataacagccaacatgtggcccactctgccaccattaggagcctagcttgtccaactggtccagcctccactgagcagtcaggtcctgctggcctctctttctactttcccagccccagggaccactctctgtgcgaaggttttccctgatggggccagaccaaccccgcctttcacccgtatgactcagtcatcaggcagatacccccaccactgctcagggtcatgaacacccatgcccggctctggctggctcgactggcttgctcatgcccacataggagggcatgccgggagcatgaaggaattcaggagttggcagatttacacagtcagaacgcactaatatcttttgaccagcttaagaataaatatggcccaacaaattgtcgtttttatgggtatttacagccaaggcactttgtaaacccaagaactagtatttcccagaggaaatctggctctcgattcttgataaattattggaaagtcagaccagccccagctcaggggtttctctctcttattagtggttccagaggtgtggcctgagccagaattaggcttgtctgggctgaagtctctgaagggggtgagcagcccccaggcacctaatgatgataccaatagtaataatcacaagcatgtgcctagcaattacttggtcccgggacactctttcaaacccttcccaagtattaactcatttaatcatcaaaacagccttacagcgtaggtactattattattcccattttatagatgaggaaacggaggcacagaggattccagtaagattcaggaatttctccagggtaaaagggaatccaacccgggtaatactcggaatgctttctgttgcaagtttaaaagctcaaatgaaactaacatttaagcaaaaacaacaatgtattagctcatgcacataaaaagtgcacgggggtagcggggaggggggcaggagctcctccacctgtgtcatcagtttcctaatatttcccagttcctgatcctttgctcctcggtcatcctcacaaggtgctcctttctcgcaggggacccagactttaaaacgcaacccatgcaaatgaagcaagaaggcagaagtcaagcccctggactcggctgttttcattggtcagattagatcacatgcactctagccatgacccactcagagaggccagagaatgccgtttgctgattggctgagcgtgggagcgaggaccccgctttgttcaaggctgggctggacctggcactgtgctccacctgcgaagtccccctccctgggtcaaaggacccagagtgcagtcaccaccccaggggcctgccaccctcctggcagttcagttaccctccagtgcagggatgctgtgcctcttccccaggtcagagaccaacagtaggccctgcttcagtttcctcatcctctagaatcaaggaggacccacgactgcctccagttcacccttgaggcttctggggctttcctgaggctgagttgccctcagcggccagactacctgcagggagtttgcaggcgctggggcccgagtttgcaggtgcggggcccagggtcctccctcagtttcacacctgcctggccctgggaccttgcaccaagaagtcatttccatggcagaatgcatcttacatcaacgtgtaccgggttttacttcttgtattctctcaaatctgatactgtcaaacatctgctttacaaatcatgacacactgtgtcactcaagcccagttgccacccggggcagggagagtcaagacaagtgcagcagccaagaggagacagcagtggcgaggctgtgtccccagatcaagctttgcctgcaggcggcttagcggatttgatgagaaacagtcctaggctccacattctgccggttcactgtgtcccagtcatgaggtccagatgcttcaggcactgggtcccccaagcccaccggtgtgtgtctttataatctctgctggacagccctgcagcgcactgcccgccatgctggctgcacagaacaggcatctccatccctcttcagtgttgctcaagagaataacattccaacacaaacatccaaactcaacaaacatacttttttgacagcttgaacatttttttaaaaagccaacaaatgttgcatcaaagcaaagccctctccccactgtgctcacagtgtggggactccccctgtcgctggtggaggccatgggagcctcaggcctctgagtccctcccctcccgttggcagcccccacgggcctgagtcctggggggatgacacagagtagggaaggtcccaatgctggagctctccctgctgcaagtgagaggcagagatggctgggttgggggcaagggctcatcaggatcctgggatgggtactgaagtgacccaggtgacatccacaggtccgggggactgactggatgtgggggatgagggtggaatcaagatgctgcctgggaccaggcatggtggttcacacctctaacccaagcactttgggaggctgaggtgggagggttgcttgaggccaggagttcgaggctagcctgggcaacatggggagatcacatctgtacaagaaatataaaaattagccgggcagcatgcccttgtagtcccagttactccacaggcagaggcaggagggttgcttgagcctggaatgtcgaggctgcagtgagccatcatcataccactgcactccagcttatgtcacaaagtaagacactgactcaaaaaattaagaattagacaggtgcagtggctcatgcctataataccaacactttgggagctgagatgggaggatccatcacttgaggccaggagttcgagaccagcctggtcaacatagtgagacacccccatctctaataataataataattcttaaaaattaaaaattaggctgggtgcggtggctcacacctgtaatcctagtactttggaaggctgaggtgggcggatcacttgaggtcaggagttcgagactaacctggccaacatggtgaaacccccccatctctactaaaaatacaaaaattatctgggtgtagtagtgtgtgcctgtaatcccagctacttgggaggctgaggcaggagaatcgcttgaacctgggaggcggagcttgcagtgagctgagatcgcgacaccgcactccagcctgggggacaagaggaaaactctgtctcaaaaaggaaaaaaaattaaaaatcaaataaaggatgctgcttgggttctggggacagaaacatgacaggagtgaattcacaagaagagggcccaatccctcctgctgctgaggacacatggagggcccaccccatgttcaggataggctgaggtcctaccagaggcaccgggatgtgctgagcagctcccgatggtggggctccctctctgaacacctggaaggacattcctcacctgggtcctgaacctggaactggcttcaggggattcagagactccatcaagaaggcctgaaggtgtgcactccactccatacttcctgctctcatctcaccagcaaggcccagaactctgagcgggcctcccgggctgctcagctatcagtaaaggagttagttcccggtgcccatgtgctctgtaccccactgcataggggagagggcaggcgccaggcatccttccatccttgtccttgatgtcactttaacaccatgggaaccttgacatccttcacacatccttctatagacagtgctggggcttcagctgtgtttgggggagcacagagaggagacagggtgtgtctgtttgtttgtttttgagacagagtctcgctctgtcgcccaggctggagtgcagtggcacgatctcagctgggatctgcctcccaggttctaccaattctcccgcgtcagcctctcaagtagctgggattacaggtgcccaccaccacgcccagatttttgtattttcagtagagatggggtttcaccatgttggccaggctagtcttgaactcctgacctcaggtgatccacccgcctcggcctcccaaagtactgggattacaggcatgagccgccatgcctggcctaccagattttaaaataatgattctgaccaggcacggtggcttatgcttgtaatcccagcactttggaagaccgaagcgggcagatcacttgaggtcaagagtttgagaccagcttggccaaaatggtgaaaccccgtttctactaaaaatacaaaaaattagccaggcgtagtgatgtgcatctgtaatctcagctctcaggagactgaggcaggagaatcacttgaacccaggaggtagaggttgtggtgagccgagatcatgccactgcactccaggactggggtcggagcaagactccgtctcaaaaaaatgaataaataaaataaaataaaataatgaatttgaaatccaaggcaggggtgaccatataattgctcatccaaaccaggacacttccaagggcgaaagggcaacaggcatgagccagaatgctccagggcaaaccataatgcatgttcattctgtcccaaggtgacttgtgagggttccttttggcttaagtgtcattataaagtcacagctttgagcatatttcctttgtttcagttcgttgtagccattcttcttactaatatttaaattgtgccatctttggcctgtaggaaaatcaacactttgaatcacctatcctcatcctaagaccgtgaagtcacagtcctgatgcgctactcttttctgagtgcatgtgcgcacctcttggaactgttaaaataagcagcgttcatccttgcccttccaaagtgtcctgggcaccggtggaggccatgcagtgcctgggggacgtgctgaaggagccaggggcatcagtaaagacaggagaccacttagagatggcccaggggactgcaaagaccccatgggcagtcaggaaggaggaagccatttacgctggtacctggcaggctgctggcgggggatgcacttgtgctgtgtttggaagctctttgaactgatcaaagctgggccacaccacgagggagctggatgcccccacgggctccctggagctatgggtatgcatgtagacagggcagccatccagcagccttcctcaggccagcccctccccacaagggaatgtgacaaccgcccccccgcacagcctgggcccccttcgtgaccacctgctgggtacctggcaccccagaatgccctgttctaatggccctggacggtgtacccctaggtcagtggttctgaaagcaggggaggcgattttgcaccctggaagacatttggcaaggtctggagacatttctggtttttacagcagggggtacaagctaaggaggctgctgaatagcctacgatgcacaggatggcctcataataaacagcgatggggcccaaaatgtcaatggggctgaggttgaaaagccctgccctaggccccaggggtggcagaggggctgtgtgtgtgggaggtagggacagagcctggacacgcagcctgcggtgtcctcccacataaggggcaattctgggtagtgtgtggaaggcaagtggagaggccagggctgctgtgttccacactggaactcccagagcctgagatttccaaaattaaacctggccttctaggtctttttgaagttatattggttagggcaggggaaaagaacatattttatttaagcatttgttggcttgatttgtaactgttagatacgtagatataggttatgtgggctgagcgtggtggctcacacctgtaatcctagcactttgggaggccgaggcaggagaattgcttaagctcacaagtttgagaccagtttgggcaatacagcaaagccctgtctctacaaaaaatacaaaaattagccgggcatgatggcactcgtctgtggtcccagctacttgggaggctgaggcgggagaatcgcttgagcctgggaggtgaaggttgcagtgagctgagattataccattgcactccagcctgggtgacagagtgagaccctgtgtcaaatttttttaaaaaggatatgtgggtcaggtgtggtggctcatgcctgtaatcccagcactttgggaggctgagacaggcagatcacttgaggtcaggagtttgagaccagcctggccaacatggcaaaaccttgtctctactaataatacaaaaattagctgagtgtggtggtgcacacctgtaatcccagctactgcggaggctgaggcaggagaatcgcttgaacccaggaggcagaggttgcagtgagccgagatggcaccactacactccagcttgggcgacagagtgagactctttcaaaaaaaaaaaaaatgtggcctctgcttatcgctttgcctcaggtggggacctaggaaacactcgtgcacaatctgtgctcagacagagacccaggagggaggcatggaggctgcaaggagcccatgagtcctgcaggaaggggcctggctgggatggttgttagattccacccaggcattccccactcatgcagatatctgcagaaccccagctgtgtgcaggcaactggctgagtgccggggatgctcaccctctaagacaagaggacaagaaaccaccaatgatgaaagagacagtggtgtgctacgagatccccaggctggggctcagggctctggggcaaatactccatggagttcccggctgccttcttcctgggtccttaccttgggtcatgtgggtcttcacacgtcccctccccccgaccaccacacttgtgcctgcagttgaattctccttttcagagcatctgggcactgccaggaccaccctagggaggggtgtccactggaatctgagtccagagccaccatgcagggacctctgagatcaccaatgcacccatttcacagattagaaaactgagacatctcaacttgtacaaggccatgcagggagggatggtagggtctggctagtgggttaaccagctcccatggcactctgccacctgccagatgcccttcccaccgggctgctcccgggacttcggtggggagggctttcacacatgtcagcattcttgaatcccagaggtctcctcctggttctgatgtactggactaaagaagaggccaggtgcagcagctcacactgtaatctcagcactttgggaggtcaaggtaggaggatggcttgagcccaggagtttgagaccagcttggtcaacatagtgaaacctcacctctccaaaaaataaaaaaaaaattagccaggtgtggtggtgcgtgcctgcagttccatctactcgggaggctgagcttgagcccaggaggtcaaggctgcagcgagctgagatcaggccactgcacccaccccagcctgggcaacagagcgtgaccctgtcttaaaaaaacaaaaaaagttgccattgtggtccccctttctccagcctggcctgtgctgtgtgagggatggccctaaccctcagagggaatggaaacttcgttcctcggtgggcagcgctggtaaccatgagtaagaggaggaagtgtccgggcctgacagggtccagggcccagctctcctgcccaagggcaagactggctgcgtggccgccactggccagcagagggcgcggcctgaggcgcccaaggagggcagcaggaggcaggcggcggggctgtcccgctccgagagcggcgggaagcgccagccaggccggccctcccttccctccggacagcccggaaccccgccacacacctatggctgatgggtgctgtcacttctgtttgctatgctttctgccatcactattgttatgttaaactcccctgactaggtctccactttctgtcccattttgcacattttgcattttgttttgttttgttttgtttatttgagacggagtctcgctctgtcgcccaggctggagtgcagtggcgcgatctgggctccctgcaacctccacctgccggattcaagtgatcctcctgcctcagcctccctagtagctgggattacaggttacccctgcccagctaatttttgtatttttggtagagacggggtttccctatgttggccaagctggtctcgaactcctgggtccttaccttgggtcacctgggtcttcacacgcccccaccccccgaccaccacacttgtgcctgcagttgaattctccttttcagagcacctgggcactgccaggaccatcctaggaaggggtgtccactggaatctgagtccagagccaccatgcagggacctctgaaatcaccaatgcacccatttcacagattaggaaactgagacatcttaacttgtacagctaatttttgtatttttggtagagacggggtttcgctatgttggccaagctggtctcgaactcctggcctcacttgatctgggccccgccccccctcctcggcctcccaaagtgctgggattacaggtgtaagccactttgtaaaaataaaaattagatccctcacacagagtccagggagggagagttccgtgggctgggagctgagaggtggggagatgggctctctgcacccacacttccctgctgtgtggccccaggcaggttacttcatctctctgtgccttggtttcacctcctcctgtaagatgcggcactgggactgcctctcaggagagtcccgcagagcagtctggggaggtgcttggcatggctgccggcacctgctcaccgtcatcacacggggacttagtcttaagaaaaggggactggaggtcgggcacggtggctcacacctataatcccagcactttgggaggcggaggcaggtggatcacctgaggtcaggagtttgagaccaacctggccaacatggtgaaacctgtctctcctaaaaatacaaaaattagctgggtgtggtggtgcatgcctgtaatcccagctactcaggaggctgaagctgtagaatcgcttgaacccaggaggcagaggttgcaatgagccgagatccagctactgcacttcaggctgggcaacagaccgagactctatctcaaggaaaaaaaaaaaaagaaagaaagaaaagaaaggaaaaaagaaaaggggattggaagcttacagccggaaggggaggcacaggctgggtgaagtgggccaggtgtcaccaggagacagggcaagggcttcagagcgggagatggggctgcgcttcagaaccctgggctctcttgggcagtgggggcctcacaccacaatccccagcactggccccaaacaggcggcttctatttctttctgcttttttagagaaggaaaactcatcctgcttcagtatgcagcagccaataaaaacacgttaatctttaacgtgttagcaaaacagcctccaatttgaatatcggctcttcctcccatctgtggcagtttgcacagatttttttttagagtggcagaatgcctcatctatgcaccagccggtggcaggcgccattcactgccacagagcctcccccagggccgtgaagggcccccatcccagaccatggcatggagtcccggcagaggggctcatctaagctctaccttagcacaagagggccccagatttgaggattttgcagatcagtaaaattacacccaaaccaactgggaaggaacatagggataccagctcatgattttgcccaggaaagccatttgagagaaaaaatagatggtcatccaagaacctcttcaattcactggagaaataaaattttgacatcaaaagggggaggcagacagaatgaaagaataacaggtcttcaaactgagcaaatttagggagacctaccgtgttgactttatttttatcatttggacgtttaaaataaccctgggggggtcaggcatggtggctcacacctgtagtccccacactttgggaggccaaggtgggaggatcacttgaggccaggagttcaagaccagcctgagcaacatagcaagaccccccccccccgtctctaaaagaaatttttatttattcatttttaattaatttattttattattagttgtttttttctggagacacagtttcaccctgtcgcccaggctggagttcaatggcatcatctcagctcactgcaacctccttctcccgggttcaaataattcttgtgcctcagcctcatgagtagctgggattacaggtgcccgccaccacgcctggctaatttttgtatttttagtagagatggggttggccaggctggtcttgaactcctggcctcagatgatctgcctgcctcagcctcccaaagtgctgggattacaggcgtgagccaccgtgcctggcctctaaaagaaatttttagattaaaaaaagaagaagaagaagaaagccctggggaatctgcagacctacccaagggggacagtgagtttagtatgctaggagtgcccagctagatccccagcccgagctattctgggctcgcctgcccccagcctgctgccccctcaagagaaccgtgaccagaaacttagtccttgggaaatatgcgctactgcagaacttgtcaaatggcaaagaatcaaggaaggaataaatagcaatattttataagttttaaaatgctattttaacacaaataccagagcaactatagcataaatcaacagagacacccaaaagtatgtttgtacaagaaatgtaataagctggtatgaaaaacagtgtcaactggtacagatggcagaaaaagccaatattcaaatgtatgctgttttactaacacattaaagatcaacattttggtacctgctgctcacgatagcaggattaaaaaaacacacaacacacacatatcctcacgcgtgatattctaacccagagaatgcaagattcttaaagaaattgtcaagcactttctatacttcatctggtggttttaaagcttccgtggttcagaggaaaatttgcatctgaaaatgcggcttttcccctagctgcctgatgttggagaaaattagaaaagcaggatgagaaaatatcagggttgtagtccttagaagtctccttccagattagtaatgggaacagaattatcccaagtgaatgactctggtggtgcctctcctctctgagtacaggacaggctatttttgtttgtttgtttgtttgtttgtttgtttttgagacagagtttcactctgtcacccaggctggagttcagtggcgcgatcttggctcaccgcaacctctgcctgtcaggttcaagcgattctcctgcctcagccacctgagtagctgagattacaggcgtgcgccaccacacctgcctaattttgtatttttttagtggagacgggatttcaccatgttggccaggctggtctcaaactcccgacctcaagtgatccacccatttcggcctcccaaagtgctaagattacacgcatgaaccatcatgccctgccagcacgggctatttttaagatgctttcaggcattgcagctctgggggcccaaaagagccctctgaggtgtgcaggccagggagcactacccgtacactacaaatgggcaaactgaggctcagacgtggtgtacagctgaccagagatcacagggcctaaaggaagcgtgatgggcgtgcagaccaggcacacaattgagcaaaaagcccccaggaaactctcaactgcctcttgtggtgtcacctcgtaagcccatgggcctgggaattgggcagcccgagttccaatcttcactcccaccaggcccgaccttaggcaagtgacctcacctctgagcccctactgagacacaagatcgacaaaaacctccccacagcgctggcatgaggatcgaaggagatgcagtgggtgagcgtggccagtgtgcatggcaactgtgatgtcatgctctgtccagaacagagacagccagccgcagatgctttacttggcttacctagtgtttttaaaagtcttttgatttgagatgaagtcccattctgttgcccaggctggagggcagaggcaagatctcggctcactgcaacctccagtttctgtctcaaataaacaaaacaaaacaaaatgcaaaatgtgcaaaatgggacagaaagtggagacctgcctcagcctcccaagtagctggaattacaggcacgcgccaccacacctggctaatttttgtatttttagtagagatagggtttcacaatgttgtccaggctggtctcaaactcctgacctcaagtgattcacccgcctcagcctcccaaagtgctgggataacaggcgtgagccaccacgccagcctttgtaaagtcttgattaaagccgggcatggtggcccatgcctgtcatcccagcaccttgggaggcaggaggattccttgagcccaagagtttgagatcagcctaggcaacagagtgaggccccatctctacaaaaaataaacaatattagctgggcgtggtggcacacacctgtagtcctagctacttgggaactgaagtgggaggattgcttgagcccaggagtttgaggctgcagtgagctatgatcatgccagtgcaccccagcctgggtgacagagatcctgtctctaaaaaaagtaagatacccatgcaaggaagtagtatgtggcagtgaagaagagtggggtacacctatctgtacaacgtaactgttgggctggaagagaatgccatgcacgttccaacaccttatttttgttttttaggaaagccaccccacaaagtcatactccaatcacatgggcagtggctcacaaccaggagcaattctgccccccagggcacatgtgacaatgtctggagacatttttgattgtcacacccaggtagggggtgctagttgtgtgtctggtgggtaagaagccagggctgtggctgaacgtcctgtaatcatgggatggcccccacaacacagagaagtccagccccatggccaggcgcgatggctcacacgtgtaatcccagcactttgggaggccgaggcaggtggatcacctgaggtcaggggtttgagaccagcctggccaatatggtgaaaccccatctctattaataatacaaaaattagccaggtatgttggcgggcacctgtaatcccagctactcaggaggctgaggcaggagaatcacttgaacccgggaggcgaaggttgcagtgagctgagatcatgccattgtactccagcctgggtgaaaagagcgaaactcagtctcctcaaaaaaaaaaaaaaaacacacacacagagaagtccagccccaaatgctaaccgtgccaaggctgagaaaccttgctccaaatgcaggacaatatctggaaggcaacaagtccagttgatgacagaggctacctctgcggagggtactgggtgatgctgatcaaagagaactttaaacccatgggtaatgtctttactttctggaagaatacatttgtgtgctgttgaattggtaaaatcaccaaggatagaaggaaggagagagggtcagagtggaccactgtagacttggccctgccccacatcttcagggcagcagagggtttgggaggggtgggagccccagggctcatgtagtcactgctgtcctcacacacccgcctggagggtccctcctccctgcagtgacactccctggagtctctgtgactgctctcacagacaccggcagcagattaggttttcacctttccctaatgaatgtgacttttagcaactgtgccgagtgtttttttaaaacagcctctttcaccaaagcatcattaccagcaaatttgttacagcttccagaccaactccatcaaatcacctgcagcccatggtttctccttctccttttcctcctcctccttcttccttcttctttttttgagacaaagtttcactcttgttgcccagtctggagtgcaatggcgcaatctcagctcactgcaacctctgccctctgctgcctcccaggttcaagcaattctcctgcctcacgtagctgggatgcccagctaactttttgtgtttttagtagagatgggatttcaccatgttggccaggctggtcttgaactcctgacctcaggtgatccaccctcctaggcctcccaaagtgctgggattacaggcgtgagccaccatgcctggcctgcacctccatcttcacgggcctggacagaattctccaattaactgagacctggtgacatttgtggtactatgcgatgctcacagcacagatgcacgctccctcttctgattccagcaggcaccaagacccaggcccagggagggccagtatgcgtcagcattgcctgtgcaccctggtgacacctggacctccttctaccaaacaaagacactgcagtaaggtggaagcctcctttgacccctctccaagagacgaccactatcacccagtatgagtaatcactattgcccagcccaggtagctggggtcactaccagacttgtatcctaaattttatacagatgatagatagatagatagatagatagatagatagatagatagatagatagacagacagatagatagacagatgatagatagataattgatagaggtagatgctggatatgatagattataggtagaaagagacggataggtggatagctgattgataaataagagatatgatagataaatagattataaatagagattatttagagagatggatagacagatgactgatggatagaggcatagatacataatacatttacagccacacacattttactgtcgtctggggctttggtgcccccatacctggtactgaatcacacatgttcttccttttcttgccttttcccccaaggcgctcactggagctctttctttgcccattacattctactaataccctcatgtcctaaagcaaggaggcagcagggatgggggctgacgtggcctcccgtactcaccagacatggctgtgtcagccagcagtggggacaccccttggccataattcagctgcccagaggggatgactttccgggatccacacgggtgctgaaggggctggtggagatgacagctggctgatcccaaggacaagcagggactgcactgggacttaaactcttaggggtgtttccggttgttcgtggtgcacaattccaccacgagcagccttgtccttgcttccttgggaagctgcgtctccaggtgggagctctctgagccacctggagcagtcacaatcagagaccagacctatttatttacttatgtttttgagacagggtcttgctctgttgctcaggctggagtgcagtggtgtgatcatagctcactgcagcctcgctctcctgagccaagggatcatcctttctcagcctcccaagtagctgggactacaggtgtgcaccaccatacctggctatatctttttttgtaaagatgaggtttcgctgtgttgcccaggctggtcttgaactcccgcctcagcctccaacgtgctgggattataggtgtgagccaccacgcccagactaactggatcttctttgagcctcccccaccctgtggggagggcagcctggggattataattcataaatgacagaatcgggtcctgggcccagatgaacctttcctgaggtcccctggtgagtgagtgaccaaagagctggccctgatgctctgggaaaacgcctggggccaaggacagcctctgagcagcagccgggccctcctttccaccacagtttccagccagagaccctgcatgcttctgcgcatggccacacccgacccagtgggccctttcactgcccaaggccgatgccgcccatccgtccaccacccgtgtcacactcactggacacataattcctgagtccctacaatgcacaggtgctgttctaggcaatggggagagagcagtgaatgaaatagtctggatccctgaatccagggagctggacttctaggtgcagggaggccaatgggtcctatgaagacagcaaaacaagtgacgtgatgcacagggaggggagagaaaggcttagtggagagtgacgcctctgcacatggagaagagagcagtcatgtacacatctggaggaagggagttccaggcagggaacagcatgtggaaaggcctggagtcaggaagtgctcagctgggaatggcctgaaaggccagtggctgaggtgccctgagggagaggaccatcccgaggagcatcctgagctctcccaggcttgggaaaatctcccttcctctccctgctctgttattccaattccccaggacgccagaaactcagacacctttgtgcaagggcctccctgagcaggagcccggccggaaagtgtcagggtgacagtgactcccagtgccgcctcttcagggccatcctgtggcctcctccagctggacccacgaagcccacttcaccctcagtctccagaagtgtccaagctctgggggctccacttggcccagagaggtctggccccactcctcacccccaccaatcttctctgggcccctttgacagaatatggggccactgctctgaaaacacaacagtgacaacagaaagtctgtgatcagggccccaaactgctgcccccaaagtggccttgaccagaccacttacatgaccattcctaaggagcggggtggctggtgggtgagccaggtgttgtgctgggtcccacctctgccaccaactccctgtgcaccctcaagccagccacctccctctccagcctcagtttcctcctgggtatggggaaggacataacaatattaacaccccccagggtgcacttgtgagctccttagggcaaatccagaatcccaggcccccgtgctctacacaaaccatctctgagacaagggagggcctgcttcataccctgtttcactccccaccaaaaatccccttgactcctctggatttaaattcctcccccaggagctcaaaccgagtcaaggctgcaaataatctgctttatttatttatttatttatttttgagacggagtctcactctgtcacccaggcaggagggccgtggtgtgatctcagctcactgcaacctccgcctcccaggtttcagcgattctcctgcctcagcctcctgaacagctgggatacaggcgtgtgccaccacctccagctaatttttttttgtaattttagtagagatggagttttgccatgttggccaggcttgtctcgaactcctgacctcaggtattctgcctgccttagcctcccaaagtgctgggattacagccttgcaccaccatacctggctaatttttgtgtttttagtagagacagggtttccccatgttgaccaggctgatctcgaactgacctcaagtgatccgcccgccttggcctcccaaagtactgggattacaggaatgagccaccatgcccggcctaagaaggcgaaatttggacccacacaggcaccagggctgtgcacgcagagagcaggccatgtgaggacaaggtgagcaggtggttgctggagcctaggacagtggcctcgggggaaagggaacctgctggcgccttgatgctggacctccagcctccagcttctgctgttcaatctacacaacccccatggacacatacaccagccccaacactgacttcatgtacacacccccacacacactgaccccagactcccactgacccttacacatgccccccacacccatgccctgccttattttaacctggagtgcaacggcacgatctcgccttactgcaacctccccctccagggttcaagtgattctcctacctcagcctcccgagtagctaggattataggcatgcgccaccacgcccggctaattttgtatttttagtggagacagggtttctccatgttggtcaggctggtctcgaactcccgacctcaggtgatccacctgcctcagcctcccaaagtgttgagattacgggtgtgagccactgcgccctgccacagtccatattcttgattatttatagttggatcaattcccttgtcacaacttaatcaatgtatcgaatatgccatcattcgtcaaataggaaccaagctaagatcccttcaagtaatcaaccgtgatttgttatcctgcagggttgctcataccaagagtgcagttcatgaccacgcttcctgcacacgtttcgctgaaggagtggttccatggtggatgtggctatttagattaaaacaaacacccagttagtaccatcaccacgggcacaagattgtatgactgcttttcaaaaagcactagtgatgtggttatagtcaataatggtttgtatcactttttggcttttttttgaaacaaggtcttgctctgttgcccaggctggagtgcagtggtgtgatcatagctcactgcaacctcaacttcctgcgctcaagcgatcctcctgtctcagcctcccaagtggctgtgactacaggtgtgtgcccactcgcctagctaatttatttttattttttgtagagacgaggtctcactatgttgtccaggttggtctcaaactcctgggctcaagcaattctcccacctcagcctcttgagtagctgggactacaggcgcacaccaccatgcctggctttttatttttatttttagtttttgtagggatctcaccatgttgaccaggttggtctccgactcttgggctcaagtggtcctcccgccttggcctcccaagttgcagcaattacaaggcgtgatcccctgtgccttgccaattttccattttagtggatcctgctcacttgggtttctatggcagtcatagcttcactcagttaagattgaggcatgccctgcctcctacctggaccccatggaaggcctccgggatgagacttgtgggttgaagtgtgtcctccagaaagacatatggaagtcctgacccccagtacctgtgactgtggccttatgtggaaatagcgtctttgcagatgtaatcaagatgcagtggggtcatacttgattagggtgctttctaaatccaatgaccggtggattggattgaggggaattatagttcgatcaactcctatggagagggggatttggttagagacacagagacacgcaaacagggaagaaggccttgtgaagacagaggcagaaagtggaatgacgcagctacagcagaggaaggccagggatccccggagccaccagaagctggaggaggagaggagggattcctccctggagcctccagggggagcacgaccctgccggcaccttgatttcgggctcagcctccagaagcatgggagaacaaatatctgctgttttaaagccaccacgtctgtgacaatttgttacggtgaccacaggaaaataatccagggactgcatctagaatttaccatgtgcctcatgccactatcactggcacaggctgaagcctttctcctttttcctctggagaagaccatcttctcctccagtagtctaagcagttctcagcccagggattccagcaagtgtctcaaagccacacactcggagagacgacggccacatgacctggctcagcaggtggctctgctgcctttcacaggagtttgcctctctgttcagggtgccacacagggacagccttggggcagacactctgctgtttattattattattattattgagacatagtctcactctatcacccaggctagagggcagtggcatgatctcggctcactgcaacctccgcctcctgggttcaagcaagtctcctgcctcagcctcccgaggagctgggattacaggtgtgcaccaccacgtccactaatttttgtatttttagcagagacggggttttgccatgttggccaggctagtctcgaactcctggcctcaagtgatccacccgcctcagcctcctaaagtgctgagattacaggagtgagccactgtgccgagcctagctgtttattattattacattttttaagagataggatcttgctatgctgctcagactggtctcaaactcctgggctcaagtgatcctcctaccttggcctcccaaagtgctggcataacaggcatgagccaccgtgcccaggcagccttgctaagcacaccttgcactcctgctgcactactcctgtgtgaggccatggagacatctgctacattgtagatactattggatacttttcaagtatcacacagcctacaatttccaacagtgcactccattcagctcccatgggacggatgagtgtcacagggcagctccacacgcagatcagggagagggtggatatcacccccatcttcctgtggctctgagaaaaggggtgggtgcccggcgtcagggcagctgacttcacccaggaggggccacctgcccagttactcgggcctccacttccctgcactcagggcactttgttggaagagggcttgtctggccatgaatggcctgaaagctgcgagaatggcttaacacacctgaagaagggacatgtatatgctgggggctggcactctcccacattagctcttttgcaccattgtcatggggatcttggggctcagagaggaaagtgacctgcatgagctcatgcagaggcatgtggcaggaccatcgcttgaacctggcactggagggccctgggctcagcacctcgggcacctagagtgagggcatccccaaggtccatgtgacccagagcacggctccggccactccctcccggaaatggatcggtgaacagagaggctgaggacctcttgcaatgctgcccagactgcatggagaagcccgtggagacatctgctacgttgtagatactactggacatttttctttttttttcttttcttttttttttttttttgagatggagtctcgctctgtcacccaggctagagtgcagtggagcgatctcggctcactgcaagctctgcttcccgggttcacgccattctcctgcctcagcctcccgagtagctgggactacaggcgcccgccaccacacccggctaatttttttttttgtatttttagtagagatggggtttcaccgtgttagccaggatggtctcgatctcctgacctcgtgatccacccatctcggcctcccaaagtgctgggattacaggcgtaagccaccgcacccggcctactactggacatttttcaagtatcacacagcctataatttccaacagtgcattccattcagctcccatggggcggatgggtgtcacagggcagccccacatgcagatcatggagagggtggatatcatcccatcttcctgtggctctgagaagcttcagaagcctcagaagcaccccctgtagcgccagagagctcagacagcttgagggcctgcagcccagccagcccctgccccacaggccaggctccagcctggcccttgcaggggtgtgctgtttccaatgggtgccatgctgtgcacatccacggggcaggagggaaagctgggggttgccatgggctgcctgggttggaggggagctgggattctatggtcaccctctttcacatcttctgacgcatcctctctctggaccctcaggcagtccctgtcctcagataagccccgctcactgagacggtgatgcttaactcaggtatgtgtctaatgacagggtcttgcagaagggaccagcctgagggactaggactgcctcacctttgcaagtcctcaattgtccaaggctggcctcctggaatgggaaggaagcaaggtcccccgaggcattcatacccttatttctcacaaaaaaaaaagtcaagtctcttgttccatcgggtgccctctgggaccaagtgactgtctcaggggcagggtgagacagtttaaatgatcatggcctctgcctgacccatgtggctgaagtgagggaggggtggcttccccaagcatccatatgtgtggggggtgctgtttccagaaggacggtgggggtcccaggccgagcttaggagttcactgcagcctcaagaggaagggcttggggaggtggcatttgcatgggctttgaagaataggcaccacctgcatgcacagagagagaggagcaccatagcgagaaggaatggtgcagacacaggccctgcggtacttttgggtagggggtgtaacagagtgcggctgctgtgtggggagtgtgctctggggttcagaacaccagaaccatgtccctgccagctggcaaggtgccctcaggaaaaggtgcccttctggcctgctacagtccccaaaaggtacacagtatggtaaatggagcacagaatggcttatggccagacgctcttgtgcagtgcacaacatgcacaactgtgtgtagtggcctgaccaggatatcaacactggactgggaagacatggcgcctcctctctgggctgaatagtgtgtgtgtgtgtgtgtgtgtgtgtgtgtgtgtgtgtgtgtgtatgtgtgtgtacaccccacagtgcttcactgggatccagcctccagcagcaacaagacacaaatggaacaagggtgactgcccccagctgacaggtgagaggttgagagccagcagccagctctgcaagcctgctgcacgctcaggagcgagcactcctccaagcaggcacctcccagagcaacaggaagcaattcatcagcagctgaggccctgctcccaggccctgcagcctgtggggactctgcagcccaatggacaggcctccgatccccccacccctagcccacaaagaggccagaggcagcgccacgcgccaattacaggagccaattaattcacacttaacaggggtattttcttttactgcgcagaaccgaggggcataaaaccctgattcgtcttctgtggctgggtttgctctctgcgtgctcatatcctttaatcactcctgccacagaccaggggccaaaccctcgccagcgaggggagccacgcgggcgattccccattaacaatctggtggggaggccacgccggctgtgctgtttacagttccgtttcccctcggctgctcccagaagtttccataaaaacagatgtaaggtaatcaaagacttcccagccccgggcctctctgctcctgaaggcttccatggagccggctccctctgctggggtttgtgcttccaaaagactcttaaagcagccctaaaatctctccccagacaggcagactcttctctggcagactctgcaatcatttgtcaagtattttatggtcaataataatagtaataacacctttgctgagcttggtgcctttttcaatgactctcagagccatgccgtgagatcccggtggcatcgcaatggctgatgacaggtgtcttattcccattttgcagatggaaaggagaaggcagtttggggaagaaaccagcctcagcaccatctcccctgggtctaacattccaggagaaaggtgggcactgtccggctccttggtggcaggcctgctgctggccttgtccctctcttcttattcactgggcctctgtccagggccaaggaacctgaagcccagtgttgggggtagggacgtggccagaacaccaggtggtatggctgggcacggtggctcactcctgtaatcctagcacgttgtgaggccgaggtggagcatcacttgagcccaggagtctgaggctgcagtgagctatgatcgtgcaactgtactctagcctgggccatagagtgagaccctgtctctaaacaaataaataaataggctgggtgtggtggctcacgcctataatcccagcactttgggaggccgaggcaggcggatcacctgaggtcaggagttcgagaccagcctggccaacatggtgaaatcccgcctctagtaaaaatacaaaaattagccgggtatggtggtgggtgcctgtaatctcacctgcttgggaggctgaggcaggagaatcacttgaacccaggaggcggaggttgcagtgagccgagatcatgccacttcactccagcctgagcgaccgagtgactccgtctcaaaaataaacaaacaggatagacagcgtaaaccctgatgaacactagaatttcagacaatcctactgccctgaaggctgggcccaacagacacatttcacagatggaaatcttgggaagggccaaagcaagaacccctggccaccccctggaagacctaagccttaaagcccctggcccataccctctgcacctcaccacattgatgtcagcctaagctgacatcagtggatgaaaaagtgatgaaaaagtgacttttaggctgggcgcggtgggtcatgcctgtaatctcagcactttgggaggctgaggtgcatggatcaccagaggtcagaagttcgagactagcctggccaacaaggtgaaaccctgtctctagtaaaaatgcaaaatttagccgggtgtggtggtgtgcacctgtaatcccagctactcgagaggctgagacaggagaatcactagaacctcagaggtggaggctgcagtgagccatgaaatgcaccactgccctccagcgtgggcgacagagtgagactctgtctcaaaagaaaatttttaaaaaggactttaaaatcaaacagcctagattgcacatgtgtgatattggtgggtctccagcccctgcctccatcctgagaagcatcctttttggggaatttcctgatgggtagagtcttggcaggagggcgatcccccttgcctccctctcactgccctttcacacgacaaagaccagggtgggctccaacctgactctgccactgcctggtctaccacatggcaggggtgagagcagggcccagccaatccgatgcctgcttccagggctgcaggtcttaagccagagatgccaggaggaagggaacctctcctgggaggttgggtttctctggtttatcataactcttgaggctcagagaggaaagtgacctgtgtgagctcacacagaggcatgtggcagggccatcgcttgaagctggcactggaaggccctggactcagcacctcgggcacctacagcgagggcatcacgaatgtccatgtgacccagagcacggctccagccactccctcctggaggcaaaacagagaacagagaggctgagtaccccttggctgcaaggtgtccctgtctcagaagcatcaggggcagccccaaacccccacccccgagttggctcagtcagctccaggacagatctcagaggtcctcactctgcagctcagccagcccttgcctgatgggccccgcgccagtccagcccttgcaaagggaaagccggaacatattttagtgtgagccccttgttgagatgagggctgaccacaggccctgggaattcctgagaagattcctctgggctctttccaatgggaagccctttttgtttgagatggctggagttagttcttgtcacctgcaaccaaaacccagactggcatgacttcaggatcagctgtgcccaggatgatcgtggttaacatgtcagcagcatctgctacacgctagatgccctccacattccttagttagttcccacaagagccctggtattatgtctcccactgcacagccaaggttattgaggcacagagaggttaagaaatgtgtccagtgtcacacagctagcaactccagccatctgtccccagagcctccatacttgaggagtaagctggtcttgcttgagagagcactgtggtttcttggatctaagagtggaagtgggatggaagctctgggtgtgtgctttatggggaggtgcatgaagtgaacccctctgctatgggggtgtgtgggccttggaggaatcctggtcccgggtgaggcaggagtgtgtcttgcttctaggaccactccaggcagggcctccctggatgccgcaagtgcagtgggtctgccctggcccaggccctcatcacagctgagaaagctctgcagggtcactgtgggtgctagaacaggcagctggaatgctgcagtgggggaaacagggaccacaggggtgagctccagttttccactgcttttttcaggggccaactggtgagtccaaggaggagaagccagtgagcagaggggcttcccccagtcccagccaaagcagctcccctgggcctgctttacctcctcaacttccacagaggatcccatttgagcaaaggactctccttagctggcaggaggttaagtctgcagtggctgatggcatctctaccaccactcagggaccacctgccagagaaggaagccacagcagaggagaacagagaccaagaaaggacctgtcaatactatttaagcccctggatccagccaggactgaagtccctggacttgctgatagcaagaaccaatcacttcctaatgttatttcagttgcacttgagctggttgattcatgtttctcttgtttgtctctgaatgggtcttgaggaacatgggtctcataccagaataagttccagcttcccctgtcttaaagagtctgctatggccgggtgcagtggctcacgcctgtaatcccagcactttgggaggctgaggcaggcgtatagcctgaggtcaggagttccagaccaccctggccaacatggtgaaatcccttctctactaaacatacagaaaattagccaggcatggcggctcaggcctgtaattccacctactcaggaagctaaggcaggagaatcacttgaatttaggaggtggaggttgcagtgagctgagcctgggcgacagagtgagactccatctaaaaaaaaaaagaaaaaaaaaaaaaagagctgggagtggtggctcacgcctgtaatcccagcactttgggaggccaagatgggtggatcacctgaggtcgggagtttgagaccagcctgaccaacatggcgaaaccccatctctaataaaaatacaaaaattagccgggcgtggtggggtgcatctgtaatcccagctactcaggagactgaggcaggagaatcgcttgaatccaggaggcggagattgcagtgagccgagagcgcgccactacactccagcctgggcgacagagcgagatttcgtctcaaaaaaaaaagaaaaagaaaaagaagaaagtctgctgctatcatactagacagagaaattccaacacctctggaggggctgcccttccttagtccgattaggagaagaaatggcagctggcactcaaccaccacactcccctgaggctactccaggggcagatgtcaaggaccagaggccaccggttctgcgaggggcagggtggagggtgtgggtggaggtatgaaccaccatgaatctcagaactctgcagtcggggccgcggcagcaccactcttgttctcccagcctgggggtcctctcccaccgcagcacctcctcctgttgttctccacccagcagcctgggggagctgccaacagaagccaaccccatctctccttgctcagaaccagccagcagcttctcgtgcaccttaggtgtgtgtgcctcggccccagcctggcctctccactctcccctctgccctcagctccagcctctctggccttttctctcattgtaggacaagcctggcttgctctgcccaaaacttgcagtgcacgagggctgctggcccctcttcttcctccaggctcagccccaaagtcacctcccccagaccagcccttcctctccctttgcagcaacaacgacctctccctttattacctgcttttccccactggaagggaagacctgggccgggcatagtgggtcatgcccataatcccaacactttgggaggccgagatgggcagatcacctgaggtcaggagtttgagaccagcctagccaacatggtgaaaccccatctctagtaaaaatacaaaaattatccaggtgtggtggtgggtgcctgtaatcccacctactcaagaggctgaggcaggagaatcacttgaacccaggaggcagaggttgcagtgagccaagattgtgctactgcactccagcctgagcgacagagagagactccatcttaaaaaaaaaaaaaagaaaaaagctgggtatggtgaggagcacctatagttccagctactcaaaaggctgaagcaggaggatcacttgagcccaggagtttgaggctgcagtgagctatgatggtgccagtccactccagccttggtgaaagagtgagaccaaagagagagaaagaaagagagagaaagagaagaccttagcactgctatgaccctggtctgtggaagaggatcctatacagtgtccactcaacaaacacttgtggaatgaatgaatgagggagtgaaggaatgaatgaatgaataataatgggcatggcctctaatgtcttgccaatgaattccctcccctcctggccacccacacctcatctccaccacacaaaactcaccctcttcatccttcttccagaaaatgtccagcacccatgatcgggggcctttcttacttccccaaagtgctctctgctcacgccagaaatcatcccaggaggaccagccccagcccgtcctggctgccccaagtgatgccgggctccagcaggtgctgttccaaggagcggtggcccagcagaatggtgggtttgttgtttttttgtttttttttttttcatatgagggaaaaattagccttccttaccagacaagaatgacaatttacagaaaactatgccttgaattcataatctgtaatgagcggaaatggtattccatagtaatccatcccaactgactcgctattgtacacgcacctgctaacattttttaagctgggactttatggaaaggacattttgattgcttctgaagtttgctgagcaattccccctctctctcaggcatacggtctttgtgctggaaatttccctcgtggctccatgcgcggactggcagacgggcacgtgggcccacacgcgggcagcacacacgcagccgcagccccctcattggcatggctctagtgggggcctctgcaggtgccgggctacagagatggaagcggggagagtggaatcacagttggcacctgtgccgagcttgcctgaggagctgcacactgcggtgcctggcggaatcggagatgctttccagcactggagggcagggacggagcacgggaccgggaaggacaagggcttgggttgggtcgcccctggggccattggggcctggcttgtggcacccgagcaccaggatgtgggaaggctgggtgtgcaaggacaggtctcacgcccaccccctcaaacgcctgggttttgctcatacggaagtcactctaggccccaattggcagccgccccactcagtccccagctcgggcctccagcccagcactgacacaaacaggtggtggacagcttgctctgcatggcccctacagactgagagccccctgaggcaggaccaaggctgccaacgtgcgcctgggccttgcccagctctggcatgcagtaggtgaaggcagtgcctccagtcggagccagggtcctggtggaggctctgcctccaggcagtgggtccggcacactgatactcagcccctgcagcctgtggctccccagggcatgttctcgtggcctcacagacactgaggttcagagatcacggagccgtgagtctttctttccactgcaggacctgttgtggtccacgccatcaggaaagtggtagtcagggcagtctataacccagcaacgacacggggatacgagaagctgggcacgtgacgtccactgaggctgtctctgtgggaacgagtatttaggaacattcaaagtggcaagcagtagggtggtgactcaagaagctgtggaggccgggcgcggtggctcaagtctgtaatcccagcactttgggaggccgaggcgggcagatcatctgaggtcaggagttcaagcccggcctggtcaacatggtgaaacctcgtctctactaaaaatataaaaatcagccgggcgtggtggcaggcacctgtaatcccagctactcaggaggctgaggcacgagaattgcttgaacccaggaggcagagtttgcagtgagtcgagatcacgccaatgcactccagcctgggtgatagagtgagattcagtctcaaaaaaaaaaaaaaaaaaaaaaaaaaaaagaagaagctgtgaaactccaggccacaattacagtaacaaaaagaatgggggtattctcgtatggaggaagcgccagaaaatgttattcctgaaaaagaaagtaagcgttaaataaagttaggtgtgtgtgcgcatacacacaatgtgaccccactttttgttttgagagagtctcactctgtggcccaggctgaagtgcagtgaggcgatcacagctcactgtaaactccatctcgactccagcaatcctcccacctcagcctcttaagtgactgggactacaggtatgtgccaccacacctggctaatttttaaattgtttgaagaaaaaaagagaacaaaagaaaataataataataataataaaataaattatttaaagagacaaagtctccctatgttgcccaaactggtcttgaactcctgggctcaagtgatcctcctgccttggcctcccaaagtgctgggattacaggcaggagccaccatgcctaacccccacttattttttagaatcttatgaaacgacaccatatgtcatgattaggtgcatccacatgtgtgtgagtacacacacacgtccatccacatacaaacatgtaagatatgtggaggacgccatggcagggagcaacgcacactatccacacatcctcctctgggggcgagaggtgggtctggagctggcaataaagtagcgcttgggccttatctgtcatgttggaattcttcttcttataatgaggatgtattcatgcatgcttctgtaattaaaaactaataatccttttaaaagaaaggaaatgctaggaggctggcttctgccctcacgtacctgatcacagtgatatgggacggtccactcaacccggaccttcatgaaatcctcctgattatttctgttcgtacactccttcattcattcgacaggtgccatccgcctgtcattcattcattcagcaaggactcactgaacacctgctcaggctccggctgcagccatgaacacgacagacaaggtccctgtcccaggagttcacattcgtgtgtgtgtgtgtgtgcaggcgcgcatgtgtgtgtgcacgtgtgtgtctgtgtgtgtatctgtgtgtgtctgtatgtgcatctgtgtgtgtctgtatgtgtgtgtgtgtctgtatgtgtgcacatgtgtgtctgtgtgtgtatctgtgtgtccatatgtgtttctgtgtgtgtctgtctgtgtgtctctgtgtgtgtgtctgtgtgtgtgggtcttccatggccccacaggactcctggagagagaagagaggaacattgggcagtggctgtccttcacccttgggctgaaggtgtggggagaagaggggactgtaaataggctgcccctgagtgtgcagaaatcacatattggccagaagatgtaatgacaggggtcttcaggcccagctcaaatgccccctcttcttgggagctctgcctagaacccccactccagccactggccacacgggaccctcagccgagcttcccagcacaataatgttctgctagtagctccaggttggactcacagactggcaaccggcaggccatgagcaggctactgagatattttgccatgtttgcctggtgggttacctagcccacttcacttcctgccagcacttgggtttgtaggccccgcttcatagtacacctggatgtgcatttgtctgattccccacccctaatcttgcttgctgtgtcacagtcactcagggccagtctattcccagtaggtggctggatgggtggctggatgaatggataaatgggtgggtgggaggatggatagatggatgaatgagtggtagatagattgatgggtgtgtggacagacagaaagatggatagatgggcaggtgggtggataggtggatgggtggatgggtggaaggatggatgaatggatgggtggatggatgagtggatcattgggtgggaggatgaatggatggatgaatgggtgggtgggtaaatggacagatgggtggataaatgagtggatgggtgggtgtgggtgggttgttgagtgaatggattggtgagtgggtggatggatagatgggtggatgtttggatggatggatgggtagatgagtgaatggatggatggatggaagggtgggtagatggatggatggatggatggatggatggatggacggatggatagatgaatgaatggatgggtggatggaagtgtgggtagatgggtggataggtgggtgggtgggtgaatgggtggatagatggattggtgggtggatgggtgagtgattagatggatggatggacagatgaaccaaataaaatagagggaataaactgttactcaggtgttaagcccctatgcaccaggaatcttgaggatgcagggagatgatgagaaagagttggagtgggggacatctccttctctttattaataagaagaatatgttataagctgaatgagccaacagatagttgctgtgcacctatgtgtgtcccgcaccgtaagtggatgtggaagaccataagagaaggaggaaaagataaataaagagaacacagcagggaaaggggaggagaaagaaaaggcaaagcccaaggctgttgagacaggatggtggagctgagggtagccaccagcagcctggaagggcagctgaagaggagagtggctgcaggagggagggcagggcctggggacactccgcccttcccacaaccacctgcagcccctctgctttggagaactaagtcttgggatgcccaaccaggagtgagtcattttttgtctctcggggacagcctgtgtcacccaaaggcccagaatctggggtagagacacgggtctcaatgtcaaggggatcaccaaccctgttggaacttcccccggcctagtaccagccccctaaacctgtgagccatgacaattcttctcaaagatagctcaaatacccacccctggggagggtcctgaagctcatgaatttacccattatttactgggcctccctggtgtgggtgctatgccaagggctgggatacagaaggaacggcaatctgccccttggagctgactgtgccatgggtgtgggaggctgggagggggacaattaaacaagcggggaagataacagctggtctccgtgctaggaagaaaatgaaactagggatatggtgagatcattggagggcagcatctcagtgggggtcagggaaagctgcctggaggaggtggcatctaagctgaggcctgaagggacctaggtgtgaagcttgcaattctgccttccccggggtaggtggggcccactcaaggcttcccactcccttgggtcctcagatctgtccatggacactgcccacaggccaggctcggcaatggggaggtgggcaggggaaaagcacaggtacctgcagggcaaacagggccagggagtaggctccccagagtcagccctgctaaggtggtgaacagctgtgcacatccagcagagggtgctcttggccgcttgggaaaatgctggaggccttcctggaggaggtgatgccagaactgggtgaagaggaagaggatgtggtttgcagagcctggagtttaagtcccaggaggaagaaggagcagtgggagatggggctggagaaggctcagggccaaatcaccaagggctggacatgctttcttttttgttgtttgtttgattgtttgtttgtttctgagacagagtctcactctgtcgcccaggctggaatgcagtggcacgatctcagctcactgcaacctccgcctcccgggttcaagcgattctcctgcctcagcctcctgagtagctaggattacaggcatgcaccaccacgcccagctaaatttttttatttttagtagagatggggtttcaccatgttggcaaggctggtctcaaactcctgacttcatgatccacccgcctcggcctctcaaagtgctgggattacaggtgtgagccactgcaaccagcctgttttttgttttttttgagtaggatgtgatccgcttatgttttaggaagacccctcttggctgctgcagcaagaatggacagtgctgagacaaggaaggaggtgggataagagcaaggcatcaggaccctcctatgagaccagcttgggcaacatggtgagaccttgctacaaaaaataaaaattggctggatgtggtggtgtgcgcctttagtcccagctgctcaggaggctgaggtgggaggatcgcttcagcccaaaaggtagaagctgcagtgagccatgacagtgcagccttgtctcaaaaaataataataataaagattgcaaagggagaaataggaaagatacgatttttttttttattttaagcccagaataattctgaccaaatcaataaagaggactcgggtcatgccccccaggagaaccctgtgtatttgctagcatcagaagtcatggaccagatcacctggacctcagagcaacaggacactaagtcagtgtctgagggagggtggatatacgccatggcatccagaagagaggagggaggacagctccctggaggaggtggcatttgagctggccctaaatctaatgttgacagaagaatgtggacagatgcacacgtcaggaaagacaacagcagaagaaaggggaggaggtgagagtccccagagtcatctggctcccaagaagcacagggtgggtgcaggggtgggttagggactcgggatcctgccagggtaaacatctgccctctctagcctcacctggtcacagggagcaaacactcaaaccccgcagccctggagcagcccaggaaggcagcctagctctgaatcaggcgttgtgcagagagaaagggtttgactgcggtctgaacaagctctgagtctgcaacagccccagcctccttgggccagtggagcccttggccttccaggctgggcccaccggctgcttcagcctggcctggccgcttccagggacacgaggtcccccatggcattggcacctccttggtaaatagcagatgggcagcaaagccccaagtgggaaatagctctaggaatggaggcttctgtgggtcctttgctcttggaaacacctccttcctgccaccttccccagtgccacacgtggcaccttgcagggccagccaggaagtctcagcacccagttaggccagcccagcagccctggcccagtgtccagcactagctttttgagcaacttttacctctctgaggacttagtttccccaacttaacagactgccctggtgcctcctggggatgtttttggacactgagtaaaatggtgatagaagactacagggacagccgggtacagtggctcacacatgtaatcccagtactttggggggctgaggtgggaggattgcttccacccaggagttcaagatgagcctggacaacatagaaagacccattctctacaaaaaaataaaataaaatgattagtcagggacagtggtgtgtgtgccattcatgtcattcaggagactgaggcaggaggatgacaagctcaggagtttgaggctgcaatgagctgtgaacgcaccactgcactccagcctgggtgatagagtgagaccctgtttcaaaaaagaaaaaagcaagtaaggacctgacaacaacctgaccagctgcacgttacaaagggcagatacaaagataagaaacgagggccaactacggcagcatttgcatccttctccatggtctggggccaggggaggcacagacctgtgggggtgaagctgcagaggggagggccagctgggctcaggtgtaagactccattaggcgaaactgaaaagaactgcaacaggccaggtgcagtggctcacgcctgtaatcccagcactttgggaggctgaggtgggtggattacctgaggtcaggagttcaagaccagcctggccaacatggcgaaaccccgtctctactaaaaatacaaaaattagccaggcatggtggcacatgcctgtaatcccagctacttgggaggctgaggcaagagaatcacttgcacccaggaggtggaggttgcagtgagccgagatcgcgccattgcactccagcctggacaacaaaaaaaaagaagtaccctgtgacccagcaaatccactcctaggtatagacccaagacataagtccacacgatcacttgtacctaaacattgacagcagcattcataaacattcatagaagccaaaacatggaaacactcaagtgtccatcagtggacaaacggatgaacaaaatgtggtatatccaaaccacagagtattactcaatcatgaaaaggaatgcagtactggggcatgctgcaacacggatgaaccctgaaaacattgcactaagtgaaagaagccagtcacagaagcccacatatgacatgattccattcatgtcaaagtccagaataggaaaatctaaagagacagaaagtagattggtggttgcctagggcagaggaggtgggtatagatgatacctaaagggtttcctcttgaggtggtgaaaatgttctgaagttgattgtagtgatggttgcacatatctgtaaatatactgaaaactgttcatatatataatatatatatatatatacacacacacacaaataaatcgataataaaatcattttaaatgggtacactgtatggtatgtgaatgatagctcaataaagctcttttaaaagaaagcctgcaaaccactggatgaatccagaatgggcaatgtcctacgagacaactggcctgaaattgtctaaaagcctcatggggggtgagtgcggtggtcacgcctgtaatcccagcactttgggaggctaaggcgggcggatcacttgaggtcaggagttcgagaccagcctgggaaacacagtgaaaccccttctctgctaaatatacaaaagttagccaagtgtggtggcgggtgcctataatcccagctactcggaaggctgaggcattagaatctcttgaacccaggaggcggaggttacagtaagctgagatctcgccactatactccagcctgggtgacacagcaagactccatttcaagaaaaaaaaaaaaaagcctcatgggcctcacaggaaggaaaggagaggggttgggtgtgttctatatgaaaataaactaaagaataaacacagcaaccaaggactattggatcctggtcaaaaaaaaattctgaggacagttggggaaatttggcatggattggatattaaatgatactattggataattgttaacattcttaggtgcagaagtgctactgtgtttactgaggaggacatccttattcttaagggataactatagaggtaataatttagacatgaagcatcatgatgtcagcaactgcacagcaaaaagtgtgtgtgtgtagagaatgaatgagaaaaagcaagtatagcaaaatagtaccaaccagtgattctgcgtagatgttaacaggtactcattatactgttttttgtttgtttgtttttcttgaaacagagtcttgctctgttgcccaggctggagtgcagtatcgaaatctcggctcactgcaacctctgtctcctgggctcaagtgattctcctgcctcaggcccccaagtagatgggatgacaggtatgtgccaccaaacctggctaatttttgtattttttagtagagacaaggtttctccatgttggccaggctagtctcgaactactggactcaagcaatccaccagcctcggcctcccaaagtgctggaattataggcatgagccaccacacctggcctcattatactgttcttttgatgttttgatatatgtaatatataaaagtcagagaagagatgtcatttttgcctttgtcttatgtctcaggaccttgaatgtcccggatttgccaagttgattttattccaaactgcactgaatctagccactttgtaccatgccctgccacattccggccctggcaccatcctccccctgcatgactgtaggcacctccatcactgggttcccccaaaaatctgttcttcaattgacagctcaaggagtctttccaagacgcacatagaattgtctctccctgtggccctgataatgaaggaagaggccgggcacagtggctcacgcctgtaatcccagcactttgggaggctgagatgacaggatcacttgaggccaggagttggagaccagcctgggcaacatagccagaccccatctctacaaaaaatttaaaaattagccaggcatggtggggtgcacctgtggtcccagctactcaggagacctagatgggaaaatcacttgagcccaggaagtcaaagttgcaatgagctatgatttcaccagtgcactccaacctgggtgacagagtgaaactctcttcctaagagagagagagtgagagagagagagcaaaggaagtcctcacagtggccccctcggccacctcctggatcctccagtgagttttggttatccaccccagggccttgttcatgctcttccttcctttaaacccttctattccctgtcaacgccttctcatctcttatgtctcaactcaagcctcactgctcagaggagcctcctcgaccccctcctcctccctcacagtccatcaggttctaaagacctctgttccttcttccaaccgcgtcctggctggtggccttgaggactgctggggtctcgctgcggctgtgtctggagctgaagcgagatggcctgacatcagtttccgttgttgaggatggtgtgtgaatcacatcttgcgctagagaatggtgcgtctaaggctcagcacacagcgatacctcgggaaatgtttgctgttatgcgactcaatacctggcctttggtgtggtcgtttgtctggcgtctccctgccccaccagcctgtggactccatgagggcagggcagcctggggttccctgctcattctggccctgagcacactggagagacaggcagtgcacatttttaaggaaaatgaaagacatggagttggatgaacatagggctgtctctgtgttcagggggccggcatgacggtgcaggagcagtggtctttgtccctttagctgttgccatgtaaatggggttcccatggagtctcagacccacctggctatggtctgcaacctttggctgttcttgcttaaggaacaggaagatgtgactttagcatgacccaaactgcaggtttacacgttggtcatgtctgagttaatgaagggtggtagacacagatatgacccccagggcccacctgcaggaagcccactgccatagcctccagctgtagcccttctgggcctgcctccactgcagacagctgcctcgccacagtcacatcctgcaaggtggccccacgctgtgactgatgaaggcggaggtctaaaggtcataccactttggcccaacacaggacagcggtggtggctactccagccctagaacgccctcctgcttctcacccctgctgatcccaggtgttgacccctaggacactctaccactcatcctgcacactgaactctgctttccggagaccccaaattgcagcttggggtgtgcctccattccaggaggaggcaaagaagctctcgctcctaaagcagaaagttccacagcttctaggtatgcatgaacgcatgtccttgatggtgaggacagggcccagccttcatatgccacttacaatgcagaatggccagctgagccctgggaaggacggctaggaccccaagtttttttcctgtctatggaaaagcgttcctcccagggtgccccttgtcactggtggccctagatggtgacttcccctccctggacttccacctggcagaatgatgccgacatactcaagaccacagaagtgggctgggtgcagtggctcactcctgtaatcccagcactttgggaggctgaggcgggcgtatcacaaggtcaggagttcaagaccagcctggccagcatgttgaaaccctgtctctactaaaaatacaaaaattagctgggcatggtggcggacgcctgtaatcccagctacttgggaggctgaggcaggagaattgcttgaacccaggaggcgtaggttgcagtgagccgagatcacaccactccactacagcctgtgtgacagagcgagaaaaactctatctcaaaaaaaaaaaaaaaaaaaaaaaaaagaccgcagaggtgaggggacaggaaagaaaactagatcttcagtgagaagtgacgtagacagggcactccatctgcagaggtggagtcctgaggagcaggaagctgtgttttcacgtcatgttttgcccagctgtccctgcccaagtccttgtcagcctctactggtcccaagaccatgggcctgcatgctcattaggccatgggcagcccgccttctctctgcttgcaaacctatctgacccctgtgtccatcccaccttgccccaacgttggccaagccaccatcttgcctggtttgaaccactggtctctatgcttctgatttctgcttcctgtggtctcccgcagccacagagcaatctttcaacaagtaaatcagacgagtcactctcccacttaaaactctccaagagcttctagtagcattagactaagatccaaactcctatgacaacccacagtgcccctgcctgctcagctcttccctctcacctcacccactctccctccgtcactgtgctccagccttcctgcgttctgtgatcccacaaaacctattccctgctctgcgcctgtgttcatgccggggatactttccccatagctctccttgctggatttttctcatgcatcaggtcttagctcaaatgtctcctcttagataccttaaagaactaaaagtagaactgccatttgatccagcaatcccgctactgggtatctacccagaggaaaagaagtcattatatgaaaaagatacttgcacatgcatgtttatagcaacacaattcacaattgcaaaaatgtggaaccagcccaaatgcccatcaatcagcaagtggataaagaaattgtggtatatatatatatgatggaatattactcagccacaaaaagaaatgagttaatggcatttgcagcaacctggatgagattggagagtattattctaaatgaagtaattcaggaatggaaaacctaacttgtatgttctcattcataagtgggagctaagctatgaggatgcaaaggcctaagaatgacacagtggactttggggactcagggggaaagggtgagggggggtgagggataaaagactacaaactggttcaatgtgtactgatccaaaatctcacaaatcaccactgaagaacttactcatgcaacgaaataccacctattcccccaaaaacctatggaaataaaaagaaatcaaatgtctccttttaagagaggccttcctccgggcgtggtggctcacgcctgtaatcctatcactttgagacgcctgtaatcctatcactttgaggtgggcagattgcctgagctcaggagaccagcctggccaacatggtgaaatcccatctctactaaaattacaaaaaaaaaaaaaaaaatcagccaggcatggtggcaggcacctgtaatcctagctactcaggaggctgaggtacgagaattgcttgaacctaggaggcagaggttgcagtgagctgagattgtgccactgcactccagcctgggcaacaaagcgaaagtctgcctcaaagaaaaaaaagaaaaaaaaaaaacagagagagagaaaggccttcctgaaccaccttatctgaagcgactcacccaagatccacttactgtctattatatcactcacttactctctcagaagttctcgctgggtgccgtggctcatgccagtaatcccagcactttgggaggccgaggcaggcagatcacaaggtcaggaggtcgagaccatcctggctaacatggtgaaaccccgtctctactaaaaacacaaaaaaattagccgggcatggtagcagttgcctgtagtcccagctacttgggaggctgaggcaggagaatggcgtgaagccgggaggtggagcttgcagtgagctgagaaggcaccactgcactccagcctgggcgacagagcgagactccgtctcaaaaaaaaaaaaaaaaaagaatttctcgtaactggccaggtgaggcggctcatgcctgcattttgggaggctgaggagggaggattgttgatcccaggagtttgagaccagcccgggcaacatagtgagacctcatctctacaaaacatttaaaagatttttttaaaagagttcttataactgggctgggcgcagtggctcatgcctgttatcccagcactttgggaggccaaggcatgaggatcacgaggtcaggagttcaagaccagcctggccaacacagtgaaaccccgtatctactaagaatacaaaaaattagctaggcttggtggcaggagcctgtaatcctagctacttgggaggctgaggaaggaaaattgcgtgaactcgggaggcggaggttgcagtgagccgagatcacaccactgcacaccagtccaggcgatagtgcgagactccatctcaagaaaaaaaaaaagagttcttgtaactaagggaaacattttaccttttgaatatattgttttacttccttatgacctgactgttctcccacctgacaacaggtctctcctgccttggttccatctgttgctggtgggagaacagcccttggcacgggacaggagttaagtgaatgtttgatggatgaatgaatgggtgaagctgtccagcctctgcaaggacgggcagggcaggaggagcccgtggtccacgctttcgagggagttctgcagacaaaggcggatgaggggcttctgttgtcttctgtttcgcattcataccatatggcttgttgcacactgggctgaattgcagatgctctaacttggagctttcttgcttttgtgtgttaatgacataaagatagaacatagctcaccacacattttgtgtttgctaactatctatatgtatataaaacagacttcagtgttactagccaacccacttgtgaagtggaaggaaaacagagcaattagagagagagagagagagagagagacggagtgagagcaaggcgaatgtgagcttagaatggggccagatcccggggcttgtgctgtgcgtgcttcctggggcagggtaggtggtgggagagatgggcctctgtgcttcccccaacctcagactctgctcaaatgcacctgatagcacccgcttcctccgggtcttccccaggaaaggcgctcccctgtcaccccacctccgacactgcctgctcccccttccaggccctcctgcacacatctttcactcaaacctgtgaaatatggagcgcctcccacgggcctctgtgcggcttccttctgccaggaaaagggcccccgacaagtaaacaaatgtccaattacaaaatgtctcaggtgctgtggagaataaaaatatggagcttaattaaaaggaggaagcatttattccagcatgtgagctgtatttcaaggcaaccaaatagccctgattgatatggaaaatttctttccggaggactctagtgaatcaacaggggtataccaaggtggggaggggaaagtaggggcactttgtccccatatttcattgctggcatagtttagagtctcaaggccatggtcatgataaaaagcaaaggacttggctgggtgcagtggctcacgcctacaatcccagcactttgagaggccaaggtgggaggactgcttgagcccaagagttcaagactagcctggggtggccaggcacagtggctcatgcctgtaatcccagcactttgggaggctgaggtgggtggatcatctgaggtcaggagtttgaggccagcctggccaacatggtgaaaccccatttctactaaaatacaaaaaattagctgggggtggtggtgcatgcctgtaatcccaggtactcaggaggctgaagcaggagaatcgcttgaaccccagaggtggaggttgcagtgagctgggatcacgccattgcactgtagcctgggtgacagagtgacactccatttaaaaaaaaaaaaaaagaccagggccaggagcggcggctcacacctgtaatcccagcactttgggaggcccaggcgggcagatcacgagatcaggagatcgagaccatcctggctaacgcggtaaaaccctgtctctactaaaaatacaaaaaaaactagccgggcatggtggtgggcgcctctagtcccagctactcggggggctgaggcaggagaatggcgtgaacctggaaggcggagcttgcagtgagccgatatcatgccactgcactctagcctgggcaacagagcaagactctgtctccagaaaaaaaaaagaccagcctcctgggtaacatgatgagaccccgtttcttttttctttttagaaaaagagcaaataactttcagtccactttatgattgctgggtctttttgtgttttttttacttttgcgatgagtctcgctgtgttgtccagcctggagtgcagtggcaacatctcagctcactgcaacctccacctcccgggctcaagcgattctcctgcctcagcctcccaagtagctgagactacaggctcccgccatcatgcccggctaattttttttatttttagtagagatggtgtttcaccatgccggccaggctggtcttgaacctctgacctcaagtgagctgcccgcctcagtctcccaaagtgttgggattacaggtgtgagccaccacgcccagccatgattgtttttaagttctctacagactatgaattcctactcccattgctgcatcagggtagactgctttcaaaccctgtccctccccaggtatgcctctagtttggaagaaatgaaggaaatagaaaaggcacccattttgcaaaccctaatcaaatgaatgactgattcaggaaacattatcgatgcatgaaactgttgggtcaggggctgatggggaacttgaccatggaacgataaggctgtcatccaccacctgaccccactggccaatctcagcatcatgagagtgggacagccagacaccacgggtcctggagctgaggacaggtgaacacacagcatcacctctagacacgaatctaattgggcttctagagcttgcttccatctccaaagaatatggggagagaggaacgagttaaacaactccatgaaaaagccaacagacaaatccaggatgtgcaatgatcccacaggagactgacccggtttctgcagcaaacatggaaaagagggggctgtgttagggtacaaaagacaaaaagatacaataagcagatgtgatgcgtggatccagttgggattgtgactcaggccaacaattaaaagacatatttgggacaactaggaaaattgtttcatattccagctaatttttagtagtgacagggtttcaccatgttggccaggctggtctcgaacccttgacctcaagtgatccgcctgcttcagcctcccaaagtgctgcgattacaggtgtgagcctgtatgaatacatgtgaatataaactgataccaagaattagtgttcattttggtaggtgtgttactggtgtggttatataagaaaacactcggccgggcgcagtggctcacacctgtaatcccagcactttgggaggccgaggcaggtggatcatgaagtcacgagatcgagaccatcctggccaacatggtgaaacctgtctctactaaaaatacaaaaattagctggacatggtggcatgtgcctatagtcccagctactgaggaggctgaggcaggagaatcacttgaacctgagaggcagagacagcaatgagccgagactgccccactgcactccagcctggtgacagagtgagattctgtttcaaaaaaaaaaaaaaaagaaaccactcatcctttttcaaaatgcatactcaagtgagtaacagtaaaatgacatcatgtttggaatctgtcttatgattcttcagccaagagaaaaagccctggctcaaggaagcagatctgacggcattttaattattcaatctgtaggataagtcaatgagggctcattatactatcatctctttacttgcgtgtatgtttgaaaatttttacaatgaaaacaacagaagcaaaagaagatgctgagaggaaattggtgagaggtgaaacataaaataacagcactgagctggagacaatggaatttagagattgtggccaggaaaggcctcctccaggaggggacgtcgatgctgaaggagccttcactaagaaagctggggaaatattggcggggagtgggaggcgtaggaacaggtgcaaacgcaccaaagaagcaaaaggcatggagtatcagagaaaaggggagtgagccaacaagccaggaacagaggggccacaggtaaggaggcccaggaggagacggcactagcaccagcccagccagatggggcctcgtgctccctacaggagatgtggtgtgatcacaatcagtgggatgctgtcagagggttttaagaaggggcagatttgatgggatgtactttttctttctttttttttttttttcgagatggagtttcactcttgttgcccaggctggagtgcaatggtgcaatctcgactcactgcaacctccgcctcctgggttcaagcgattctcctgccttagcctctcgagtagctgggattacagatgtgcccggcccatgcccagctaattttgtatttttagtaaaggcagggtttcacagtgttgaccaggctggtctcgaactcctgatctcaggtgatccaccagctttggcctcccaaagtgctgcgattataggcgtgagccactgcacctggctgacctctaagagttgattctagctattcagtgacaaaggcattttggtggggaagagccaccgaagatgaagagccagttcagcagacagtgcaactttccagcctgcagaccatggcttggtctaggatggtggcagagaaggagagaagtaaacagattggaaatatctggggatcagagagccactggggctggctggtgcatgccatgtagagggggttggaaagggaaattcaaggctaagtgccaggcttggggtttgagcagccaagtaaatggtggtgccatttttctgggatgtgggagatgcacattgcgacagggtggggaaattcagagctcacctttggatagcctacatcaattagcaacgcttgggaaacaggcaagtgagcagagctgccaagtgggcagggcagaggcgtgggtgggagacagcagggcctcctggggagggagcctatggagctcactgctcccaagctcccagggacgttctgaagaatcccatcatttacacagaggaggaggagccaaggcatgaaggggagcagccaggaaagagggaagggaaccaggagaccgtgtcgtcccttaaacccagaggagaggtgttctcaaaaaaagggagtggcagggtgtggtagcacccgcccataactctaacactttgggagactaaggtgggaggatcgcttgaggccaggagtttgacaccagcctgggcaacatagtgagaccctgtctctacaaaaaaaaaagaaaaaaaatccaaaattggccaggtgcagtggctcacgcctgtaatcccagtactttgggaggccgaagcaggcggatcacaaggtcaggagttcaagaccagcctggccaacacggtgaaaccctgtctctactaaaaatatacaagaattagccagagatgatggcatgcgtctgtaatcccagctactcaggaggctgaggcaggagaactgcttgaacccaggaggcagaggttgcagtgagctgagatcgtgccattgcactccagcctaggtgacagagcaagactccatctcaaaaataataataataataataataataataataataataataaaattagccaggtatggaggtgcacaactgtagtagcagctacttgggaagctgaggtgggagaatcacttgagctcagaagtttgaggctgcggtgagccatgatcacaccactgcactccagcttgggtgacagagtaagaccctgtctcaaaaaaagaaaaagaagggaataatttgctaggcccaacattcctgagagggctgtgaaatcaagcctggtgtgtgcccttcaaagttggagaaatggggggcactgctgagtacctttgtccatttgggctgctgtaaaaaaatcccatagactgggtggcttatagacagcagaaatttatttctcactgttctggaggctgagaagttcaaggtcaagacaccagcagattcaatgtctggtgaaggcccgcttcctggctcatagaaagtggccttgtcactgtacccttacatgctcacatggtggaaaaaaacaagggagttctcttgggcttcttttttttgcgacagagtctctctctgtcgcccaggctggagtgcaatggcgcaatctctgctcactgcaacctctgcctccctggttcaagtgattctcctgcctcagcctcccgagtagctgggattacaggcacccaccatcacgcccggctaatatatatatatatattttgtatttttagtagagacagggtttcactatgttggccaggctggtttcaaactcctgacctcaagtgatccacctacttcggcctcccaaagtgcggggattacaggtgtgagccactgcgcccggctggcctcttttacaaaggcactaattccctcccacaggcctcctaacaccatctctttgggggttaggattttaaatgtacagatgtggtggaagcttcggtgacttcgctctctgcttctctcctcttcctgagctgcttagggacccctgctgctaggcgcttttttccctgcatttcttatgctgttctgtgatgagcagggccctctttttctcctccaccggggtaagcatcttgagggcaggttgcctggttcagacttcaagccccagaacagaattcatccctgcagccattcccgcaggctaaaagagcaccggttgtgtgcacggcacctcgtggacccggtatgatggcactataactgatttccctgttacccaccagcatgaagggcatgaagacagggaacttcattagctgtccccaaacacaggaaattagttcattgaggccaggtgcagtggctcacacctgtaatcccagcactttgggaggccgaggcaggcagattacgaggtcagaaattcgacaccagcctgaccaacatggtgaaatcccgtctctactaaaaatacaaaaattagccaggcatggtggtgcacacctataatcccagctactcgggaagctgaggcaggagaatcgcctgaacacaggaggcagaggttgcagtgagccaagactgcaccactgtactccagcctggatgacagagtaagactctgttccccaccgccccccccaaaaaaaaggcaagaaactccatcagttgtccccaaacacaggaaattagctcatcaatcacccaccaccccaccaaaaattaatcagggtaaacttaagaagggactccttgtgggaaccaaggaacagaccctgaaaatatagaaaatatagctatcttctccctaaaggccaggcacacagaacccaccacggccctcacgtcagcctcacattcatcctcttcattatcctcctggccagaggagaagtgacttccccaaggtcacatgaaggaacactggagttgggttccatgcacaccagggcacttctcttcagcagaggggatggcaccatgggcacctgccagccactgcagccactccagggcctctccctgcaggatgctctcctgaatgagcctcatatcaggggctgcccatcctttggcctcccgacacccctgcccataatttatctttcccttacactgacacaatattttaatattttaatatttttttagagacagggtctcaccctgtggcccaagctggagtgcagtggtgcagttacagctcaccgcagcctcaaactcttgagctcaggcagctctcccgcctcagcctctcaagtaactgggattgtaggcactcaccaccatgtctggcattttttttttttttagagagggggtcttgctatgttgcccaggctggtctcgaactcctgggctcaagcgatcctcccaccttggcctcccaaagtgctgagccactgtgcctggcctggacacagttttatatattaattttagataatatcacacactgacaataatgaatactggcaaggatatagagaaaagagaaccctcatatactattggtgggaaagtaaattaatacaaccactatggagaacagtatggaggttgctcaaaaaaaactaaaaacagaactagcgtataattcagcaaccccactgccatgcatttataaataatctggttagttataaattgtatttttataaattgtatgttataggtatatttctaaaggaaatcggtatatcaaagagctagctgtacacccatgtttattgcagcactattcacaattgctaagatttggaatcaacctaagtgtctatcaatggattaacggattaaaaatgtattacacacaaaaaacaatcacacactgagttgtttcttttttttttttttttttttgagacggagtcttgctctttcacccaggctggagctcagtggcgcgatctcggctcactgcaacctctgcctcctgggttcacgccattctcctgcctcagcctcctgagtagctgggactacaggcgcccgccaccatgcccggctaattttttgtatttttagtagagaccgggtttcaccgtgttagccaggatggtcttgatctcctgaccttgtgatctgcccgtctcggcctcccaaagtgctgggattacaggcttgagccaccacgcccggccgagttgtttcttttttaattctctttcaaatgatccagttaatcaaagagaaagtatcagtttgaagctaagaagctttaacacctcgctaatgtttgcgtttctcccttctaaaaacactgtggggcgggacgcagtggctcacgcctataatcccagcacattgggaggccaaggtgggtggatcgcttgatctcagcagtttgagaccagcctgggaaacacagtgagaccccgtgtctcccaaaaatacaaaaattagccgtgcatggtggcacatctgtggtcccaaccacttgatgagtggattgctggaggtgggaggatggctagagcccgggaagacaaggctgcagtgagccgtgatcacactgctgcactccagcctgggtgacagagcgagaccctgtctcaaaaaaaataaaataaattgtggtaaaatatacacaacataaaattgaccattttaaccatttttaggtgtacaatgcagtgacattaagtacattcatagcgtgcagccctcccatcatccatccacagaactcttttcatcttgtaaaactgaaactctgtaccattaaacgaaaactcctcatgtccctcccccagcccccagcaaccaccattcaactttctgtgtctgtgaatttgaatgctctagggacctcccataaacggaatcacagagtcacctccttctctacacaggtggagatcagggcctcaggctcatgtcttgggcaggcagcagcctctgcctcctgttgctgtcctgagttataaacattttcttacttcccttctctttgtggctagcaaggctgctcttcttccatttatgataatggattgaaatctacttttcaaacaagtggatctaagtgagaaatagaattcatagtgaaaggctgaaggtggagaggctctcacagcagaggagaaaagaggggaagaagttgggaggtggagaaaccctggccttgggagtgaagcctcctttgtgtccagaataccagcgaaggaatgcgcccctgactcggtgcacccggcctccttggcttcctatcgcctttcgtagctttcacctttgccctcatccattcatccatgcacttatttattcagcaaacttggctgtccagagcctatggttggccctggggaatactccggccccccggcctgggacgctcccaatctaactcctctgcaaagccttcttccgtctcttgttctgtttgtttaatcctaatcctaacctcatctaggaccctatcatgcagactctgagtcagctctgaattcccacgtgaggtcccaaggtcagacaacgaccttggccaggttgatatttaagggagtaaagacatagggtgaggtggctccacccaaagagggcagcctcctgctgttgctctgcacacgtgtgggctcaactgtgccaaatcatcctattgtcccctgagccagaggccctcccgtatccaggaattcacagctttgctagcatgctgggctggccagtggtgttccagatgagtcctgcttggttagaccccagctttcccacagagtgtgtgaggtgttcctgggagctcctggagggcagggccatgtcggtccactccagcccactagagcttgccctgggctggcacacagaggcttccaaggccaccaggctgagtcatcagtggattcccatatgactgatgtaagcgtgtggccgagggatgatgccaggagaagtcaggattcctggggaattgagacaatgagtctaatgtccactcccatgtgcaggcctggcatctacacaaccagggccagtggatttccagaccttccacatgaggggccaacgtgggtctgcaggactactaggaggctcactggtaggcacaaatgggcctgcccaggactagacaaactttcacggttcattgtcctttgacatccatgactgtcttggttgcaagttataagaagtccaaacccaactggctacataaaaacatgaaaatagcgaattggctcctgtatccaggaagcttctagtaatccagtcttgggcttgattggatccagaacctcaagggatcagaagtctgcctcccagaacctctggctctgctttccaggaaggacttccctctacgaaaggtcaacttatgtggcaagatggcctcatggctgcaggcccacttctagtcggcttagcaactcctgaggctcgtcattggcccagcctgggtcattgtgcttatgcctgagccaatcgcatggccaggaatgcgggattctgattggccaaggcccctcccccattaaagtgcagagagggtgtagcttggaggaaaatgctggaccctgacaggaagggagaggccagggcctttgctatcccagcccgtgctctgtcttgcagctgtgcctgtcttcagaaatcccaaaatgagatttaaatgaaagctgagggtatggcagtcagacacagaacagaacactcttgtgtgttaactggtgctgagagggtagcttcctgctgcgtatctgcccagccacccccacctccccaacctcatcacacactcccactctttcaagcatcttcaaattagtctctgccctttttttttttttttttttttccagagacaggggcttgctgtgtcacccgggatggactgcagtggtgagatcacagctcactgcatccttgacctgcagtgatcctcctgccttcgcctccagagtagctgggactacaggcgtgcaccaccatgcctggcttatttttctatttttttgtagagatgggggtcttgctttgtagcccaggctggtgtcaaactcctgggctcaaaagatcctcccacttcggcctcccaaagtgctaggattacaggtgtgagccactgtgcccactgcccaccctgtctctactccttacaaccctgaagttaatacagaatccaaaaatgtcagctgccatcattatcctatcatacactaagttaaaaggccaattttaattttccctggaagttttcattggtcacagcctccatctgaagaagcgatggctaggcttgctccccaatgtaagaggaggttaggccgggacagaagcaccctttcactggttttcatccttcccaccttggtggctttacacagcagtgtgcgctggttctgagcaggaaccaagccttggggagcatgggttgggcccttgcctggctggctggggggcctgtgcaggcagattgtcccgcccagggaggacaggagccaagcctccagggctttcccatgctcacgttccctggcgctgggccgcagacactctgtggttgacagcctggtcctgttcatcttgcccggctcccacttcacagctcacactggtatagtgtggccccctcctcttctagtatttccatgtgtagcctcacaagataactggctcatccaggtggccacagatgtccagcttggccccacagcaaggccttagccagctccactgccagccacagcccacaccttccctgatcaacctttgctagcagcggggctctttaattgtccgctaagacgcctttgaggacctggtagaagttaggctccagctgcctggggaaatgcacatgggcccaacagtaggcaggctcctgggtctccaaaggctgtccagggatcccatgttaaggaatcctatctgggaaggacttcccccttgcaatcccttggtcttccttctccttaacctttatgtcctggtgcccgtcctccatcatcagagcctgaaccatataggaagctaagcaaataacccccaaatctctttatgagtaataacaacacaaattgagcagttaccttgtgccagatactgttgaaaacacttgaggggtattaatacatttacccctcaccgcaaccccatgacgttgggacaattagaattatacccattttacagatgagaagattaaagcacagagaggttggagaaccttcccaaagtctcatagcaaaggggaggtgttgccctccctacacagcagctggttcaccacctctgatgcaatccacagtctccctcaaggctgggccaatgctcgggagctctggacttgaggcaagcacagaatggaatgaacccaaacacccaaaggtgagctgccctagaaaggcggacattgggccgggtgcggtggctcatgcctataatcccagtactttgggaggcccaggtgggcggatcacctgaggtcgggagtttgagaccagcctggccaacatggtgaaactccatctttactaaaaatacaaaattagccaggcatgatggcacatgcctgtaatcccagctacttggtaggctgaggcaggagaatcgcttgaacccaggaggcggaagttgcagtgagctgagatcgcgccattgcactccagcctgagcaaaaagagcaaaattccgtctcaaaaaaaataaaaatgaaaacaaaagacatcagtggtttctgaagactccaagctgctgtataggctgtgtctgccatcttggacacaacttttctattgttcctattaaatgtgttcatccttctggcttacatgccattttcttcatgcaaacttcttgccatccaaggatgggttggatacatccttctccacatgaagtcatagccccaagactcttcccttcccagccctatcatgctacactgcaaatgcatgacagcctcccttccacaccggaagctcccaagagggcagggattgtgtcttgctttgctatgtcttgaattaaaaaataataataataattattggctgggcgcagaggttcacacctgtaatcccagcactttgggaggccaaggagggagaatcacttgaggccaggagtttgagatcagcctggccaacatagtgaaacactgtctctattaaaaatacaaaaattagccgggcgtggtggcaggcgcctataatctcagctacttgggaggctcaggcagcagaatcgattgaacctgggaggcggaggttgcagtgagctgagatagcgtcatcacactccagcctgggcaacaagagctaaactccgtctcaaataataataataataacaacaataataataaggccgggcacagtggctcactcctgaaatcccagcactttgggaggccaaggcgggcggatcacgaggtcaagagatggagaccatcctggccaacatggtgaaaccccgtctctactaaaaatacaaaaattagctgggcgaggtggcgcatgcctataatcccagccgctcgggagactgaggtaggagaatcacttgaacccaggaggcagaggttacagtgagctgagatcgcgtcattgcactctagtctggacgacactctgtctaaaaaataaataataattattattattatttaatttttattgagtaaaagatacattcagtaaagtgcacaaatcctaggtgtgaacttttatgtatgtatcaatcaatgagcttttatgtatgtatacagtcatgaaaccaccactcagatcaaagcatacatgtctagcccctagaagtttcccctggtctcctcccggtcattactcctcaccctaggggtaaatactgttacggtgactgctgtcttttcttaaacttcaaataaatggaaacttcaaataagtgtgtctggcttcttgggctcaacatgttgtctctgaaattctcatgttgctgcatgattccttggtttgtcctttttattgctgtgtggtattccattgaattaatataacaacatttatgtatccattctattcttgatgaacatgtcagctaggatgtggaggatttgggctctatctttgctggtgggtgtatacattgctgtaatgactaaggaaaactgtcttgtctaccatcattataataactcatttagtgagcatttactgtgtgccaggtactgtacaggagtcagctacattatctcaatcttcacaatgatccttgggagtagatagttgccatctgtgaaacaggataattgtggcatcaacatgaataggattattgtgaagtttaattgagatgatactttgaaggacttagcccagtgctgccattttggaaacactgtttatgatacctgttactggtgattcctaacgggcacaggatggggggttcaggtgcctgggtccctgctgagcaagtagcccagcagccttggcctcagagcacctgggggaatcatgaatttgtgagcctctttgataagaccctggctctaacttcaagaaaacggtcactaggggagggtgagggacaggactgagactttagcttaagaagggccctgggagcattccagagccttcttttacgcacatcttcctgaagctgagtacagagggtactctgaggtgatgactgttccttacctgtctctctcattagccggtaagccctgcaagggcttggccagtgcctgtctttcaaatgttcattcagaaacaatttaagtgtctcccttggtccaggcactatgccaagaactgacagatacagcagtgagcaagatgggcaaggtggggagagagacaagaaacagagaggcaccaagactgtgtaggggctgggctcccagcactttgggaggccaaggcgggaggatcgcttgagctcatgggtttgagaccagcctgagcaacatagcaagaccctatccctacctgccaccccccaccccccgccacaataaaaaatacaagtcttgagggagaaaggacagaggagctgtggagaggaggcctgaggtctgagggtgggggatcagggtcaggtcctgtggagcctgtagcctaggacacggagtgtggatttgacccttatgcgaaacaactggaaggctttttgtttctttttctgtagaaatgggggtctcactgttacccaggctggtctcgaacaccccaagggatcagccgtctcggcctcccacaatgctgggattaaaggcgtgagccaccgcgcccggcctcaactggaaggctttaagtgagagatggggtgcaagggaatcccagagtcagaaaggtcttcagagagccaggaagggcttgcgggggaggggcgcatatggaaggggcgcatggaaggaactcacagattccttgaatgaatgaatgaacgacccaatgcactgacggatgaatggacaggcggccaggaatagcagccggcccccagggagccccagaccccgcggcctgaagccttggttctaggccaaggcacaggcgcggtgaccttggggatgtccccgcccaggactcagggcccggaactcggcgtctcgggggcggggagggcgtgcctggcgggacagcgcgcgcggaggaacggcgggcggtgctcctcgggtaggccccccacacatccccttggctcagccctgccggggcccgaacccgcgccgcccgccgtgtttacattccacccgcgccagccacgcggctttttgccgctccagcgccgctcggccccgcccccggcgcccgcggcccgcccctcgccgccgcgcgccagacttctcccgcgtcccgcccgccgccccgccccgcgtcccgcgccccgcgccccgcgcccggccctcggcgcgcaggccctgtcacttggccccgccctgtccgccggccccgcccctgattccccgtccctgcgcctcgcgggccggcgccgtggaggggcgggtccgggggcggggcgagggacggggcgggacgggctctgggtcccgcgcggccgctgaggggctgggagccgcggcggggcggtgcgagggcgggccggggccggttccgcgcgcagggattttaaatgtcccgctctgagccgggcgcaggagcagccggcgcggccgccagcgcggtgtagggggcaggcgcggatcccgccaccgccgcgcgctcggcccgccgactcccggcgccgccgccgccactgccgtcgccgccgccgcctgccgggactggagcgcgccgtccgccgcggacaagaccctggtgagtctactgccgcgggctgcggacagggactcctggggcccagaccgcgccggggagctgggtgggggcggggtgcggccgggtcgcgggtccccgggcggcgtcgcggggcgcccgggagggtgctgagagcgcggcggggtggggtggaggggacactgaggcagcccgggccccgggaggcgacgggccggtgagggcggcgggggcggcgggaccccgggtcgggggtcggcgggtgcccgggtcgcgggtgacaggccaccccgccatcggccatcttcctggctcgcccggccgcccgcgcgcaaagggggaaggggtactgggcccgcggcctgaccccgccgccgcctcaccccgcgccgccccgcaggcctcaggccggagcagccccatcatgccgagggagcgcagggagcggtgagtgcccgcgccgcggggccggacgggacgggacgggacgggacgggtggcgtgggggaggggcggccgcgggtgctcacccggcccggtgccacccgggtccacagggatgcgaaggagcgggacaccatgaaggaggacggcggcgcggagttctcggctcgctccaggaagaggaaggcaaacgtgaccgttgtgagtacaaaagagacaggttggggagcatcccccccatctcacctgggtacccgacttggctctgcctacgggggcgggggtcccttgggcaggaacggagctcataacctgatcagctttctcttcttctctctgtttttgtcttgtttggtgtgtttccttggggtcatgggggtggcttcatgttagtttttgcaggatccagatgaagaaatggccaaaatcgacaggacggcgagggaccagtgtgggagccaggtaggtccgcccggggttgggcctctgtggaggtccttctccccctgggtcacatggggtttcatgctgtcttgtctcttgctggagacactctggtgagagtgaacttctctaatgcagccacagcccatatggcccagcactgtacctgtcagtgggcactggcctctgccagtcctgggattccaggaagcttggtgttcctgactggcaccgtctgagattacagatatgtgcctagcctggaagaaccagaatggacatcacagtattcagtcctccccttctgcccaggaggaaactgagactcagttagaggaagaaagtaacccagagtcctgtgccatccaggggcaaagttgggctctcggccttgtctgtaaaagctggtgaactgggggagggttcctgggtgtttataagcaacaactttccccctatctacacctatttttcttgtcatggtgtttaaggacctcctccgtcttctgtaggtcagatttcaaattcttctcctctttctggccctggaagttcttatagcccctccagcaattacctgcattgatccccagctcagcctgacctcagcaagagtatcagtggaacattcagtgtaatgataggtggtgtctcaatacatttttttttgactgcttttcttttctctccttaaggagttcctgccaaatttcctgcatgcagtgtgataatcattataatatcagaagtttcttgcagaaaaagcttgtactatctctttactttcagaaatggctggagactgtagttatggctccagtgggggaagcagcctatctctaaactagctggtcaggccttctgactctatcacagataaacgctgaacagaaacagtgttcgacctgagtgcagggatcccagctaggttagcagagaagcccctcactttgcagagcagcagccagggtagttcatctggaagcgtgaagggtttcaacgcagtgcgccgtgttctaaatagcagttgtcactgcatgtaaggtcccccgaaataagcatttctgaggagggtccactgactattgaagaaagggttgctgatttcctttttcattcaaagaaatcatttcagagacggaaatgagacggcatatccccagttttttttttcttcccttaaagtacattcaaatcaagcaagttgattttttaggtattataaaatgaattctgactttgtgaaattcaggactgtttattttcccagctgtgttttgaatagaaaagaaacttccagctgaagatgaagcagggccgtccctgttgcattcttggagttttagaagcatgtctgttctcaaggatagcctgagcagtgacgagggtgcctcctgggacggattgtggctctgtcccctggccacagtgtggatagctgtgctgccggaatagccataccatttcccactagaaggcattttcgtggttatccagagattaatggcgacagatttctatacgttttgtagagtagatagcttaaacattagctgtctatgtatggagcagtatctttgttatttctttgtggagcttcatgaaactagaacttgggggtacaacagaacctttttccctgctcacatacagaatttttctctggagttatcataattccccccagtacgacagtcttgagctacttggagccattgtgccaaactcttgtgtaactgcttcatcgagaccacatggaagctttttaattttcatcttaggctgttcttaatgaaaagaatacccttttatctaagatctacttaacacgtccattttgttgtttaatttttttgcacaagactcaatctttctattgaagtggaatcctggactgttacttttcagaaaataatcctatgtaaggaaaaaagtggtatgaggagttggagtggttaggaatcccgtgggtctcttattgttatctcattctttcctaaataaagtcagacagatcttgctttgaaacttggtgtacactcaaggacatagacttaattattctacctcatccactggtccctaaaaaggccaactttggaaaccatttgtctgctgatggttcacctagtttgggaactgctgctggactcatctatgtccaaaggcctgctctcagatgtgccagccatctggctgtagagggtggcacccagcattatgccttcaagactagaattcattcttcctgaatgaagaacaacttacagcggttgtaatgtgaccctttttgagttaaggaaatgccacccgcacatggtactagaactgaaaggaagcagccttgctcgcacagctgttggcaggagctgtcatggataatttgcatgcccaattctttgtacattgggtggggaagagctttatctggctttgctcttctaactgaaagtgcttgggcttcctctgaaggcggccaatgtgttgtggtcgccaccatgtgctgtgtcttcgaggtagcacttacagcccgagtttccactttcatttatagtgaccccagttgtctattttgttctttagtcaatgttaatggtctctgcttttttttttttttttttgggggggggacagagtcttgctccgtcacccaggctggagagcaatggcgcgagctcggctccctgcaacctccgcctcccaggttcaagtgattctcctgcttcagcctcccgagtagttgggattacaggcgcccgctaccacacccggctaatttttgtatttttagtagagacggggtttcaccaggttggccaggctggtggtctctgctttaaaaaaaaaaaaaaatgccaggtgcggtggctcaggcttgtaatcccagcacttttggaagacaaggcaggaggatggcttgagtccaggagttcgagaccagcctggacaacatggcaaaaccccatctctacaaaaaaatacaaaaattagctgggtgtgctcgtgcatgcctgtagtcctagctgctcaggaggctgaggcaggaggatcgcttgaccccaggaggcagaggttgtagtgagctgagattacaccactgcactccagcctggggaacagagggagaccctctctcaaaaaaaaaaaaaaaaaagccaagtctcagactttcatatggcttccatgctagtaggattgttacctgcctaatatctttagcaaagttactattttataactttaaaaatcaaacagacttcttagagtaggaatagctttaaaaatgaaaatattctaaatggactttagtgtttttcagatattgaaaattgaatacatatctgaaacctttaaaagaaaagcatagtgctttggtttctaatagttccttattttatcaggtatttgaattaccctgcaagactcaggagattcagaggtcttaaggagtgtctaggctagcttcctgtagacttcatagtatgacctgtgaccatcacttgatttggttttaactaggtggatgttcattctgtttgtttcgagttaaggaaaagaaaaagtcctttattatttaacatatttggctagtcctgcaacaaaaagaaaatgtcacatttgatgagtttttgttttaaactgaggggactttaatacatatggcagccaaatttacatttttgatcttttttttattatacttttaagttttagggtacatgtgcacaacgtgcaggttagttacatatgtatacatgtgccatgttggtgtgctgcacccattaactcatcatttaaccttaggtatatctcctaatgctatccctcccccctcccccccatttttgatcttttatactaatgaatgtgaagtgcttatgtaaatatttttattgacagttctgttttacttttaagaaattttagtagatgcattgtactcattaaaaaaatctttgagttgtgacaaaaaatatcataatgtatctttttggaagcactttcagaagtcatgcctagtatcttactgagttgcaggtgaatttgtaatgtttttgggtaatgtaagagctgtttgcatcttatctcacctctcctgtgtatttttcatttacagccttgggacaataatgcagtctgtgcagacccctgctccctgatccccacacctgacaaagaagatgatgaccgggtttacccaaactcaacgtgcaagcctcggattattgcaccatccagaggctccccgctgcctgtactgaggtcagtgccgactctgccacatggcttccaggtctcttactccatgctcccctttatccctcatagcatggacgcattcttacccctttgtgggcctcatttttgttgtgtgttttgttgtagctgggcaaatagagaggaagtctggaaaatcatgttaaacaaggaaaagacatacttaagggatcagcactttcttgagcaacaccctcttctgcagccaaaaatgcgagcaattcttctggattggttaatggaggtgagcttgagtcttcctgttcgcttcatgaaagcactgagcatttccagcatttttgtgtattaggacctctgtgtggtttattccctcgacatgttctccatctctgaagctatatggtatatttttactgtggtggtctttctgttttgcttgtattcttagcaagaatttctgaaatctttttatccttcagatgttttaaaattggcatctaattttttccatccaagtttaaataattgttaagattgtattttccagtaaattgtaactgttaacatttgagctttgttcattatgttcattaaattgctttttttttttttttttttttgagatggagtcttgctttgtcacccaggctggagtgcagtggcacaatctcagctcactgcaacctctgcctcacgggttcaagtgactttcctggcctcagcctcctgagtagctgggattacaggcgcacgccatcacgcccagtattttttttttttttttttgagacggagtcttgctctgtcacccaggctagagtgcagtggtgcgatctcagcttactgcaagctcctcctcccgggttcatgccattctcctgcctcagcctcccgagtagctgggactacaggcgcccgccaccacgtctggctaattttttgtatttttagtagaaatggggtttcaccgtgttagccaggatggtctcgatctcctgacctcgtggtttgcccgccttggcctcccaaagtgctgagattacaggcgtgagccaccgcaccctgcctaatttttgtatttttagaagaaacggggtttcaccatgttggccaggctggtcttgaactcctgaccttgtgatccacccacctcggcctcccagaatgctgggattacaggtgtgagccaccatgcccagctaaattgcttttaaatgtattcactgggatgcatatatcacctgttttatagctactgtcataaattgtaaacatatatgaacaagcttatcttaaacaggtctgacattgctcctttttaacttcttggaatccattcccttttccaccattcccatttattctaataaaatatattgttcaaatcctggctgggcacagtggctcatgtctgtaatcccagcactttggaaggccaaggcagaaggatcccttgagcccaggagttagagactagcctgggcaacatagcgagaccccatgtcttttttttttttttttgagacggagtttcgctcttgttgcccaggctggcatgcaatggtgtgatcttggctcaccacaacctctgcctcccgggttcaagcgattttcttgcctcaggctcccgagtagctgggattacaggcatacgccaccacgcccggctaattttgtatttttagtagagacggggtttcctccatgttggtcaggctggtcttgaagtcccgacctcaggtgatccgcccgccttggcctcccaaagtgctgggattacaggcgtgagccactgcgcctggcccttgagaccccatttcaacaaaaaataaaaaattgtcagggtatagtggctcaggcttgtagtcacaactactggggaggctgaagtgggaggattgcttgagcctgggagttggagcttgcagtgagctgtgatagcgccactgcactccagcctaggtgaccatgagactctgtctcaattttttttttaagcatatttttaaagatatttggaccattggagtggcttctgtgttttgagacagagttgctctgtcacccaagctggagtgtagtggtgcagtcacggctcactgcaggctccaattcctgggctcaagcagtcctcccacctcagcctccgcagtccttgggactacaggcatgagccactactccctgccgattttttattttttgttgagttggggtcttgctatgttgccccggctggtctccaactcctgggatcaagggatccccatgccttggcctcccaaagtgctgggattgcaggtgtgagctacagcacccaactcaaatcttttcttggtccacactattttatttctctttaacagttaatcaaaagaacaagtataacaacatttgatagataatggttaaacataaaagatgagattttattggttgtatatcttactgggatgaactgcggtagcttatagtttcttgattaagggaagcttcctagacaaccttgtaagacttgaatgggtgagaagtgggcttttcttctgaagtggaaggacatctcaggcagacctgcttcatgaaaacatgtagaagttgagtgtgtaactacagaagtacccctcatcctcgggggtacatcccaagacccgcaggagatgcctgaagccacagatagtactgagctctagatatgccatgtttttaatcctctactttcatgttttcacttaaagaaagcacttcacggcttctctttggcatttccaaatagccagcatcactactcttgccctgtggggccattattcagtcaaataagggctgcttgcttgaacaccagcactgctgtgctgtgacagtccatctgatgacctgtgtgctagtgagtgactaacaggcaggtggcctactccacggggatgtgcgggcaaggggatgattcacatcctaggcaggtgagggtgggacaggccagaagggcccctcatttaaaacctatcagttgttaggctgggcacagtggctcatccctataatcccagcactttgggaggccgaagcaggtggatcacttgaggccgggagttcaaaaccagcctggccaacgtggtgaaataccatttctactaaaaatacaaaaattagctgggcatggtggcgggtgctggtaattccagctactcgggaggctgaagcaagagaatcgcttgagcctggaagttggaggttgcagtgaaccaagatcacaacactactttccagactgggtgacagaataaggcacctcaaaaaaaaaacaaaaaaacaaaaaactatcaattgttgagttcaggaactttgcattttatattttccttcaccaaagtcattacaagttttttttttttcccctccctcaagtaaaacttacttgtgctaaaacttactaaatatgttttcaggtgtgtgaagtctataaacttcacagggagaccttttacttggcacaagatttctttgaccggtatatggcgacacaagaaaatgttgtaaaaactcttttacagcttattgggatttcatctttatttattgcagccaaacttgaggtaaataattttcaaatatttgttctataatgtgtgttatttctcgagctccactgagattgggggaagaggttggcgcttagcctatagcactcatcctaaatttttctgatttgctaccctgtaaagttaagacacatgccaaaaagaaaaaaaggctggaaagtgaccaggaagagaaaagtagtgagggtatggaagacctaggttcatgtagttacattgagccaaaaaaaaaaatgaactttgaactaagataataattttgggcccgggttggtggctcaagcctataatcccagcactttgggaggccaaggcagctgggtcacttgaggccagtagtttgagacatggtgaaataccatttgtactaaaaatacaaaaaattagccaggcgtggtggcacgtgcctgtaatcccagctattcgggaggctgaggcaagagaattgctggagcccaggtggccgaggttgcagtgagtcgagatcctaccactgcactccagcctgggcaacagagggaaattctgtctaaaagaaaaaagaaaagattaaaaatttgtgtatgattatcaaagggtatatgggcccaactttcaaatgtgttaaaggtactgaaaaggggatatttcaagagtacccacaatgagtcaaagttccatccatttatttaatggtgggtgggagttgtgttcttttttttttttttttttttttttacaaccattggtgtggcttctgtgttaattccatcagtgcgccctctctctttccatgccagggtactgagaagtcattttggatgcattataaattgagactgttagagattggctttggtgctagtgccatcttttatttcctttcaggaaatctatcctccaaagttgcaccagtttgcgtatgtgacagatggagcttgttcaggagatgaaattctcaccatggaattaatgattatgaaggtgggttccagtgaattttccggccattttttaaatgcgtacggcagatcttttccacctgaagtgtgagtgcctctgggaggtgttctccagctggacacattgtggcatggaacatggctgcattttgaacttcttttctcaatcatcggtctcttttctctctgttttcctttaggcccttaagtggcgtttaagtcccctgactattgtgtcctggctgaatgtatacatgcaggttgcatatctaaatgacttacatgaagtgctactgccgcagtatccccagcaaatctttatacagattgcagaggtaagtggctccatcacgtccgtggggccaccttccctgcagctggagtgaggaactctagaataggcgtgtggtggcatccatctcagcgttcttttcttctccgtagctgttggatctctgtgtcctggatgttgactgccttgaatttccttatggtatacttgctgcttcggccttgtatcatttctcgtcatctgaattgatgcaaaaggtttcaggtaagttggctttccagtgcatgcacaaacaaggtgtactaagcttacatccagttgtcagcctcagattaagcccacgatgtcttcactgcagggtatcagtggtgcgacatagagaactgtgtcaagtggatggttccatttgccatggttataagggagacggggagctcaaaactgaagcacttcaggggcgtcgctgatgaagatgcacacaacatacagacccacagagacagcttggatttgctggtcagtgctgctccttctttcagtccttcttggccaaattcttaaaactgcctaaataggccagccgcggtggttcaggcctgtaaacccagcactttgggaggccgaggtgggccgatcacttgaggccaggagttcaagaccagcctggccaacatggtgaaaccttgtctctactaaaaataaaaaaattagccggctatggtggtgggcacctgtagtcccagctactcgagaggctaaggcaggagaatcatctgaacccgggaggcggaggttgcagtgcgttgagatcacgccactgcactccagcctgggcaacagagcgaaactatgtctcaaaaaaaaaaaaactgcctaaataacctgttcacttttcttcaggcaggccccaaatatccttgaaaaactccaattttaattaattgaaaaagaaaaatcctggcaaattgatgctgtatctcactatcatatagactatagagttttaaagtgctctttgatatttttttttctttcactcacctccgtagaaaaagacatagtggccagacacagtggcttttggaggccaaggcagaaggactgcttaagctcagaagtttgagactagcctggacaacatagggagaccctgtccctaaaaaatttaaaaactagccaggcatggtggcacatgtctgtagtcccagcactttgggaggcggaggcgggcagatcgcctgatatcaggagttcaagactagccaggccaaaatggcgaaaccctgtctctatgaaaaatacaaaaattagctggacatggtggcgggtgcctataatctcagctactctacttgggaggctgaggcgggagaatcggttgaaccctggaagtggaagttgcagtaagccgagatcccaccactgtactacagtctggatgagaaagcaagtctccatcttgagaaaaaaaaaaaatttaaaaattaaaaaagaaaaagcctatggtaattgaagcccaaggatatgttctactctaatgtgttgtcccttttattcttaccaacaggacaaagcccgagcaaagaaagccatgttgtctgaacaaaatagggcttctcctctccccagtgggctcctcaccccgccacagagcggtaagaagcagagcagcgggccggaaatggcgtgaccaccccatccttctccaccaaagacagttgcgcgcctgctccacgttctcttctgtctgttgcagcggaggcgtgcgtttgcttttacagatatctgaatggaagagtgtttcttccacaacagaagtatttctgtggatggcatcaaacagggcaaagtgttttttattgaatgcttataggttttttttaaataagtgggtcaagtacaccagccacctccagacaccagtgcgtgctcccgatgctgctatggaaggtgctacttgacctaagggactcccacaacaacaaaagcttgaagctgtggagggccacggtggcgtggctctcctcgcaggtgttctgggctccgttgtaccaagtggagcaggtggttgcgggcaagcgttgtgcagagcccatagccagctgggcagggggctgccctctccacattatcagttgacagtgtacaatgcctttgatgaactgttttgtaagtgctgctatatctatccattttttaataaagataatactgtttttgagacagctggttttatgagctatgtctggtaacttaaggtagcagtcagctttaattgtggttatatcaacttctgttttttgacttcatacttcttgaggctcaagtctttcttttttttttttttttttttttttttttttgagacagggacagggtctcgctctgtcaccaaggctggagtgcaggggcacaatcttggctcactgcagcctctgcctcccgggtttaagcgattctcctgcctcagcctcctaagtagctgggactacaggcgtgtgccaccacacccagctaatttttgtatttttagtggagatggggttttgccatgttggccaggctggtctcaaactcctgacctcaggtgatctgcccatctcagccttccaaagtgctgggattacaggtgtgagccaccacacccagccttgagtcttaactcttttggtcaaatacatttttcaatgtatttgatggaaaggaaactttagacgtgggcttcaggtgcagcctgtctgcctcctggtgccccctgagctggaagtgaggagtccacctggtatttgtctcaccacgccctgcactggtggctgctcacaccaggtttgttggccatcagtagtagtagtgatgaggtaatgtccacaccgaagaggattcctaggtgtaacttccttcctaggactggttaaaggccataaggaatctggaattagcatgatttaatgcttttttttttttccccttaccgaaatcttagcctaaagaataagtgaatttttatttggagaacttttaacatagtagcctaaaactgcttttaagaagaaaatgaggctgggtgcggtggctcatgcctgtaatcctagcactttgggaggccaaggtgggcggatcacaaggtcaggaaatcgagaccatcctggctaacagtgaaactccgtctctactaaaaatagaaaaattagccaggcatggtggcgggcacctgtagtcccagctacctaggaggctgaggcaggagaatggcatgaacccaggaggcggagcttgcagtgtgctgagatcgcgccaccactccagcctgggcaacagagcgagactgtctcaaaaaaaaaaaaaaggaaaagaagaaaatgtggctgggcgtgtggctcacgcttgtaatcctagcactttgggaggctgagttgggcagatcacttgaggtcaggagttggagaccagcctacccaacatggtgaaaccccatctgtagtaaaaatgcaaaaattaaggctgggcatggtggttcacgcctgtaatcccagcactttgggacccaaggcaggcagatcacctgaggttgggaattcaagaccagcctgaccaacatggaaaaaccccatctctactaaaaatacaaaattagctgggtgtagtggcacatgtttataatcccagctactcgggaggctgaggcaggagaatcccttgaacccgggaggcagaggttgcagtgagccgagattgcaccactgcactccagcctgggcaacaagagcaaaactccatctcaaaaaaaaagaaaagaaaagaaaattagccaggcgtggtggcacacatctgtaatcccagctagtggggtggctgaggcaggagaatcacttgaaccaggaggcagcagttgcagtgagccgagatcgtgccactgcactccagcctgggtgacggagtgagactctatctcataaaaaaaaaaaaaaaaaaaaaaagtcagggcgcagtggctcacgcctgtaatcccagcactttgggaggccgaggtgggcggatcacctgaggttgggagtacaaaacaagcctgaccaacatggagaaaccccatttctactaaaaatacaaaaaaaaaaaaaaaaattagccaggtgtggtggcacatgcttataatcctagctactcgtgaggctgaggcaggagaatcgcttgaatctgggaggcggaggttgcggtgagctgagatcgcatcattgcactccagtctgggcaacaagagcaaaactccatctcaaaaaaaaaaaaaaaaatgcgaagtagagtcatatgtcagctgagcgcatgatgcagcctgttcgctgagcactgatggagtcaccaagtgccttgctaatcattgctgcccacttacaggcctcgtgtacagctcatgtgacctttgtttttgtacttttagtagagacggcggttcaccatgttggccaggctggtctcgaactcctgacctcgtgatctgcccacctcagcctcccaaagtgttgggattacaggcgtgagccaccacgtctggccgctcacatgattttttttttttttttttttttttttgagagggagtctcgctctgtcacctaggctggagtgcagtggcacaatcttggctcaccgcaacctccaccttccccctgttcaagattctcccacctaagtctcccaagtagctgagattacaggtgcccgccaccacacccggctgatttttgtatttttagtagagatggggtttcatcatgttggccaggctggtcttgaactcctgacctcaggtgatctgcctgcctcggcctcccaaagtgctgggattgcaggcgtgagccaccgcatccggccactcacatgactttttactgaacattcttcaaatggtggtcttttggagtcttgtgtttgactaacagtgcttcatcacgtgtgctagtgcatacaaggaagggtgaatgaacaaataaatactgcttattttcaacttggtattttatctcatttggcaaaaatctaaagaaaaaagcagccatttgaaattcgtaaccatacgcagtgagccaagatggcaccatggcagtacagtctgggcgacagagcaagattccatctcaaaaagaataaaataaaatctgtaaccatatttgtatgaagttggagagactttacttttgacattgatgtagttctggcagatttttttttttttttttttttttgagacggagtctcgctctgttgccaggctgaagtgcagtggcacaatctcggctcactgcaacctccacctaccaagttcaaggcattctccagcctcagcctcctgagtaggtgggactacaggcaggcgccaccacacccagctgattttgtatttttagtagagacggggtttctccatgttggccaggctggtctcgaactcctgacctcaggtgatcctccctcctcggcctcccaaagtgatgggattacaggcatgagcaattgcgccggcttttctggcaagttttatttatttatttatttatttttattttattttatttttttgagatggagtctcactttgtcacccaggttggagggcaatggcgcgatctcagctcactgtaacttctgcctcctgggttcaagcaattctcctgcctcagcctcctgagtagctgggactacaggcgcgtaccaccacacccggctaatttttgtatttttagtaaagacggggtttcaccatgttggccaggctggtctcgaactcctgaccttgtgatccgcccgcctcagcctcccaaagtgctgggattacaggtgtgagccaccgcacccggccctctggcaagttttaatactacagttatcctaataaacgcattgtaaatctacatgtaatggtatttagtcaaatgataggactagccagttatttcttcactttaggcagagatgttctagtcttaaaaagcagtgagtttttggctgggcgtggtggctcacacctgtaatccccacactttgggaggctgagttgggcagatcacttaaagccaggagcttgagacaagccttatctgcaacctttgcttcccaggttcaagtgattatcctgcctcagcctcctgagaagctgggattacaggcacctgcccatgcccggctaatttttttttgtatttttagtagagacggggtttcaccatgttggccaggctggtctcgaactccagaccttgggtaatccacctacctcagcctcccagagtgctgggattacaggcgtaagccaccttgcccggcctacatttagcattttcttttttttttttttttttggagatggagtctcactctgtcacccaggctggagtgcagtggcatgatctcggctcactgcaacctccgcctcccaggttcaagcgattctcctgccttagcctcccgagtagctgagactacaggcacccaccaccacgccctgctgatttttgtagttttagtagagagggggtttcaccatgttggccaggctggtctcgaactcctgacctcaggtgatccacctgccttggcctcccaaagtgctgggattacaggtgtgagccagtgtgcccggcctacatttggcattttgtaagcaaaaagatggcactaaaaaatttctatttccaaagtttcataaatttgagagcttgacacattgaggtaacagcaaatttgaaagtacgtttgaggctaggcacaatggctgaggcctgtaatcccagcatttagggagattcgaggtgggaggatcacttgaagtcaggagatcaagaccagcttggccaacatggtgaaacctcatttctactaaagtacaaaaaattagccaggtgtcgtgctgggcgcctgcagtcccagctactcaggaggctgaggcaggagaatcgcttgaacccagtaggcagacgttgtggtgagctgagatcatgccactgcactccagcctgggtgacacctaaaaaaaaacaaacacatttgaggtaaatattaattcataggtcatttagccacccaccgtattagagagggtgctagaatatgctgaaataagaatgccttatatgtaacttgttggaatgctgtgtttctggaagtcaaagctttttaagtggcagtgttgtcacaggcagctcttaattattggtgctaataaaggctaagtcctgaatgggtaaatgacatccatattaatcaatcatgtctatactcaggaaccctaagagctgctagtaagtagaaatcaaaattcccctgtaagaggagctttttccacttgctagtaatccctgctttggcctctctctcattggctgcaaataccccttgaccaagtcgcttatgttctgctattcagctaaagccagatgaggccacaagagacactggggtgaaaatggcagctcagtcaacttgggtgaacagatgtcctgaggagatgtgttagcaagaaggaccagagaaaggaggtgatgtggcccctgatctaactctcgggttagagatggagaaaaagcgagtgattcaccaaccctggagaccctgaactgtggttgagcagaccatatcctcatatcccgcctcagctcacagaattcacttgcggccaggcacagtggcttatgcctctagtcccagcactttgggaggccaaggtgggcagattgcctgagctcaggagttcaagaccggcctgggcaatatggcaaaactccatctctacaaaaaatttaaaaatttaaatttttttgtggtggcgcatgcctgtagtaccagctacccaggaggctgagatgggagaatcacctgagcctgggaggccgaggctgcagtgagccatgactgtgccactgcactccagcctaagcgtcagagtgagaccctgtctcccaaaaaagaattcacttgctagagtccgccagagttgttgtcatttctctgcccactgtgcctgacgacaacaacaacaaaaaaaccctggtcctcaggtggtgggagtcaagggttttccaatgccgtcttccctgtgtggaacacggacagcttactctttcatgatggttatttggtaccatgtgataaatacatgatgcagaggttcacactgacttttagtttctaaggcaggtagagccatggagccctttaagattcagagcatggcacccaatacgtgtccatcctctaactcagacacaaacgagattggagtttatttgggcaaaattaggctctagctctgagcagggctagagagagaaatcaaatctgataatgtctagtcatatttacccaaccgtgcattttcctaccacatgttccacattttgaaattcaaatcacatttataccttggacattgttagaagactatttttatccctgctgtaatcatctaatttgctgattacaggtctcaaattgccacagagaactcaatttttgaaagaattgtcctgtttgatcaaatatgttattcaagcaatgcagtcatttgttccacaagtttacctgccaggtagagttaaccaggagtaatagcattagaagcctatacttaaaatcaagcattagctaatccgcctgcgacaatagagtcttaaatataatttgctgcagatacttcagttcctgcaccgacagacaattgcagtctgtatccaatgagcacagattttttcctacctcgtcccaattccaaatttaacttcagaagactctaatgtactcagttgcataggcttaccaggtactctttcctgggagcctcacatgggagggcaacactatcctttattcaataaacagcatcccccaccttttaaatcattttcctgatcaatgccaattccaaaagttgtgtggtatctgattatgcagtgcggttcaagtcaaatgctggcttccttggggttggtgagtgaggtgccctcgatggagtccctgctaagtgtacactgccagtcctggagacatgaactcaagggagcctgggagaccggggaagccctggagtccccggagggcactggtatgaaatgaaaaggtggcactctaggagcagagcagcagcaggactcaagctcgggaggtggggctgtggaatgctctccagcagtcacaaaagccctcacaaatagggtagaggaaggccacatcacaaggggcttttgccgtcaactaagatgggtgtggtctcccccgcagcaggaagccggtgtttgtaagacaggagtgacttgctcagagccggtttggaggaagaggttgatgaacaagtacagagttatgtgtctttgtgccgtaagaaaatgactgtgcaagtcgggcgtggtggtgtgcacctgtaatcccagctattgggaggctgagatgggaagtatcgcttgagcccaggggtttgaggctgcagtgaggcatgatcacaccactgtactccagcctgtgcaacagaacgagaccctatctcaaaacaaacaaacaaaaaatcaaaaaagaaaatgaaaatgagtgtgtagtgtgtggaggacaagcaggcaggcaatgaggacattcgtaaaatcagctgcatcaccatcatttctaaatggcgctgcctgcatatctccccaggcccccgtgattctgctcctgtgcccctgcccaggcctctgcctacagtggctggaccccacctcctgcaggagtgcacccctgacgttggcccacactgatgtcatttcttcactgggttctggaggcagttgactcatgtgggaagccggctctgccacttcccagagtggtcttgggctctgtgcttcatttctccaagcttcgtgtttcccagctgtgacctgaggatgacaacatagtgcttcccccatggaaccgaggggagatgaaatgaggtcacgcatagatatgttgagcacagcgcttggcacattaaagagaaacagcaaatgacagctgatccctcttattgccaccactgggttcactgtcactgagctaggctgttctgtgaaggattgagcattctcttttctttttctttttctttttttgggacggagtctcgctctgtctcccaggctggagtgcagcggcatgatctcggcttactgcaacctctgcctcacgggttccagcgattctcctgcctcagcctcccgagtagctgggactacaggcgcccgccaccacgcccggctaattttttgtatttttagcagagacagggtttcactgtgttagccaggatggtctcgatctcctgacctcgtgatccacccgcctcagcctcccaaagtgctgggattacaggcgtgagccaccgcgccgggcaatttttgtatttttaatagagaacggggtttcgccatgttggccaggctgggctcgaactcctgaccttaggtgatccgcccacctcagcctcccaaagtgatgggattacaggcataagccaccatgcctggccaagcattttcttttttaagagagagggtcttgctctgtcatcaggttggagtgccgtggcacaatcatagctcactgcagcctcgacctcctagacccaagagatcctcccgcctcagcttccagagtagctgggactacaggtgcacaccaccatgccctactagttttaagttttttttgtagagatgggggaatctcactatgtggcccaggcacgccttgaactcctggcctccagtggtcctcccgccttggccacccaaaatgctgtggctacaggcgtgagccactgtgcccggctgagtttagcactggggacgtgttctagccctacagacagccctggtagggcactgaggtggggacttaccggctgccctgtgtgccttgcgcagcccagggcacagcagtgaggactccaggaatgcctgggagcttgtgcaagcgagcccttagcctccttagcctctccccttgggcccgcccctgtgtcttctccaggcttccacccccctccctctcccaacttcccaacttgtcttccttctgttttttgttttttgtttttttttgagatggagtctcactctgtcacccaggctggagtgcagtggcataatctcagctcactccaacctccacctctcaggttgaagccattctcccccacgtagctgggactataggcacacaccaccgcgcccagctaatttttgtatttttagtagagacggagtttcatcatgttggtcaggctggtctcgaactcctgacgtcaagtgatctgcctgcctcagcctcccaaagtgttgggattacggtgtgagccatcgcacccagccgccacttcttttcctgggcagcccctttgaaagtgtcatctacactcactgtcactccctcttggaccctctccagttggcgtcgccacaccacacagtgccctcaacaaggccacctaagacctctgtgggacaaatctcacagtatgcgtctgccttcctctcccaaggcacctctgccacacttcgctctgctgacccctctttccctctggaaacttcagtgccagctcccccccgcccccacgcaccaagcatcatccctcccaggcagctcctctctgctccagcataaggtggaggacccgcagattcatcccggccaccgccgcccccttgacatttgtccctgggcaacctcaccacctggaagactttgccactgcctctgtgccggcctcacccaagcagggggtctctaccccaatgaggcctgccctggctgcacacctgaatgcccacttgcctgcagggggcctccacctgcgcccttcaccaccttctagaaaaactccttatttcaccttccattgttcatgctattacgaaaaatgggaactggcaatacacaatcaacatgaaggtgactcaatccgcaagtcatcggggaaatgcaaaataaaacaatgagataatttcacagccaccaggttggcaaaaattttaaagtacaaagaacaatacaaatgaatagctgtggatccatcatccatatttgcctacttggcttcatatcatgttttaaagaagaaatacaacatttgagtatgcagcagtttgtcaaaagaaaaaaactaaaaaaggaaatacaatattgtagacatagatgaagatcccctcatgttcctcctcagctgaaacaactccccaaggtggatgtatatgatgcccatacatatttttagacttttaccatttatttttggatccagaagcaataaatagacttatagcaaatactgctttgggtgtttaaaaaattacctacatttggtggaaggaagaaaaagaaatagtaaaaaaacaaaaaaagaaaaaaagaaaataagtggaatcaaactttacatatcacaatatcacttgctattttctttcaatgttattttcttttctttctttctttcttttttttttttttttcttttttgacatagagtctcgccctgttgcctaggctggagtgcagtggcgcaatctcagctcattgcaacctccacctaccaggttcaagtgattctcctgcctcagcctcctgagtagctgggactacaggtgcccaccatcatgcccagctaatttttgtatttttagtggagacggggttttgctatgttggccaggctggcctcgaactctttacctcaggtgatctgcttgcctcagtctcccaaaatgctgggattacaggtgtgagccaccgtgcctggcctcagtgttattttcaagatttacctatgttgatccacgtagggttgagtttattcttttgaaatggtggtagaattttcccctgtgtgaatgttccacaatagatatgctccctgccaccctggtccacaagtaggtttctgattttttcaccatcacaaacagtgttgcaattggcatcttgtgcacattggtgccacttacctggattcctttagggcacattcctagatgtaggattgccacgtcaaagggcgtgtgcctgtgcaccttaactagatgtggtcagtgacttcctcaaactgcaccaatctccgcttcccgccagggagtgtgagagctcctgcctctccacccttgctccagtactcagtatcgtcaacttctcttcccattaaaattgctagtatttaactttattggtttttctctggctatgaaagtaaagcttgtttgttataataaatcagaatactacaaacacgtacaacatagaaactgatgattccccagagatgccgttcttaagagttggagtgttaaaacagtgtacattgctctagaattcttttcaatgcacacgctaacacatgagtgaatgaaaatatttgctgtttttctacagggcggtttcattcagttatatcatcactaagtagtttaaaatgcatatgcacatacaaactcactccttttctgttgttatttctcagtgatgacttgccaattgattccattgccttcctggcacaaaatagctgctcagtaaatacctgctccatggatggatggatggatggatggatggatggacggacgcacggatggacggacagacagacggatggattgatggacgaacggacggatggatggattcttacatttatagccactttcttacattttcatgcccaggagactatagactatcttctacttgcaaaagaccaaaagattgcataagattagaaagcgagacattaacagaaattaatcaagcccctgtccaggttctagtccttttttgagcaaaggtgccatacaccacggaatcccagttcctggcggggttaccgggggcatggcatccaacagcccagtctgcaatgcaccattagacacacagacaaatccatcccctctactttggggcagcactgtgatgaaccatccttgggatactgtcccttttttaaaaggaaaaaaatccaaagttagtatgttccagcagtcacagcctgagtcatccatccagaaagctctctgtgctcctcttgctaagcccctgagttatctcttgttatagacaagtaatgaacatccaagctctgtaagatggttacttggtctgaagcattccctccttcttaaaaaaaaaaagttttatttattttattttttacatctcttattatttatttatttattttttggtagagatgggctctcactatgtggcccaggctggtcttgaactcctggcctcaaatgatcctcctgcctcagcctcccaaagtgctgggattacaggtatgagccaccatacccagtcagaagggttgcctttgaagttctgcatcttccatccctcttctaagctgtaggggattcgccccagcattcagggctaatgtagaggctgcacgttggggcctgcaggtcaggtgggttgtgctggggctgccgagtcatttcaaaacacttgaggcaatattgaaaacctggaaagttcacattcagatacagctccccagctctgggcagccctgcaggcagggcatgtggtctgcaatataccagaatcctcaccacctctaccacaccctacgctaaggtctcagactccattgctgtttaccttcacaaacgcactgcacatcttcttggagtagacaaatatttcttgtaactgtgactatcaaaagtgagaaaacagctttgagtgcagtggcccacatctgtaatcccagcactttgggaggctgatgcaggaggatcacttaaggacaggagttcaagaccagcctggacaacatagtgagacactgtctctacaaaaaaattaaaaattagccgggcatgatgactcatatctgtaatcccagcactttggtaggccgaggagggcggatcattagagcccaggagttcgagaccagcctaggtgacatagcaagaccccgtgtctttaaaaaacaaaacaaaagtgagaaaactgtgtagatcaagaaggtggagtgtttcaagaagaatggcagagagggaacatttcttctagaaatgcagactacttgagcatgtttaatattcaatacaaagatgtcttggtgtccaaagacatcttcttttatgggcctggctcccataggcacctgagtttgagattcctggatttataggagtctcggctctgaccccaaggtcctgtggggctttcagcttgtcccttacttactatgggcctcaatttcctcatctgcccaatgaacaccatctctactaaaaatacaaaaattatctgggcatggtggtgcgtgcctataatccagcaactcaggaggctgaggcaggagaatcacttgaacccaggaagtcagaggttgcagtgagctgagatctcaccactgtactctagcctggcgacagagtgagactctgtctcaaaaaaaaaagttgctttctgtttctcttccaactcttgtcttccaggtggtgatggaagactagtttggggatgttttcaggtttgcaatcatacttcagggaactcccctgcttcctgtcatgcaaaggagctttcatttctctagatgtcagggtgggtgggtgtgagagagacagtgggcaggaccaaagtcaaactagcaagcaggtgggcgagaagctgccaggggcagagagaagcccgcagcctccaccccacaccttacttctattccctaggcctcctggtgatccctgaggtgacctttggccctcagtccctctaaggcacatcaaggccggaggtgaggcaggtgtgattccagggccgctgccgggaaatagttcccccacacccatcaaagcctggtgcctgaaaggtaactggttgtctggtggctctggagagagagatccaaggtgggaaggcgctcaggcctcccaaaaaagcttccagcactgaggcggactttgctcttccttgaagggaaccctgcactgtgctcccgggaaaccccctctctgattccaccactgtgatggagaaaactgaggctgcagaagaaaaattgcagctgcagaagatgagtgtacagatcccaggagtgatttttccacactgttcatctccgtgctatccagggcagctgaaaaggatggctcatctgcggcttgagatagatgcagacgtcaataaggaattcacggaaacacaaaaggcgggctgggtggcttttattaattatatttcttctatcttcaaaacaataacacatcagtaatctacgttgaatgagcccaattgatgccaatgatttctttttttctttctccttttttttttttttttttttgtgagacaggttcttggtctgtcgtcaaggctggagtgcagtggcacgatctcagctcactgcaacctccacctcccgggttcaagtgattctcatgtctcagcctcctgagtagctgggattacaggcacccgccaccacacccagctaatttttgtattgttagtagagacagggtttcaccatgttggccaggctggtctcgaactcctgacctcaggtgattcacctgcctcagcctcccaaagtgcagggattacaggcgtgagccaccatgtccagcagtgatgccaatgattttatccttttgtttctgttggagggaaaaaagaaaaaaggtctgtctgcccaagctagtcagccctcgcatgagcctggagatcagcaaagccctagaagcccttaccagggccccctcactgccatttttgcatcctggctctccctggcaatgcccacagcagtcctgcctggcagtgcccatctgctgtgtccccagccaccgtcccctctcctgcgttcttctttgctatagtcccacgtagaggagttctgacctcagtattgagtcctctctttgggtggaggtagaggcagggtatgtgtgtattgggggtctggggggcagtgtttagaaactgaggacccctcttggtgcacctcaaatcacattcctcacctaacggttatttctgaagaaagaaaagaaataatcggttctagattgctttcttcctacaatccttatctattatcattagatttcactgtttggcacacattagaaaagggtatgtgtacggtggggcacacagcaacggctgaaagactcacagattatttgcccgcttctgtcatcactctccacccccagatcctagggtgaactgtcagggatggcatcgaacagtttccaaacttaaatgtgctaaacctcagtatcctttcctcctcctcctccgtgccaccccagaacaggcggtggctgcacatctggcccaggaaagaggcactgagaaaagcattcaggcaatatacaaatgagagagacaggtgcatacacctgacatttgttattatttggatacaaacgtcattagcatgtgagcttcaaacagccgctaaagtctgggctctgtgcagcctccgcacctagatttcaccaaaaggcgctttcagaatggggttgggatgacctttcctggacccacttcaccaggtagccctggtttgtgaaaatgacctagataaggctgggcgcagtggctcacgcctgtaatctcagaattttgggaggccaacgtgggtggatcacttgaggccaggagttcgagactaggctggccaacatggtgaaaccccgtgtctactaaaaatacaaaaattagctgggcatgatggcacacgcctgtagtcccagctacttgggaggctgaggcaggaaaatcgcttgaatctgggaggtggaaattgcagtaagctgagatcgtgccactgcactccagcctgggtgacagagtgagactctgtctcaaagaaaaaaaaatgtcctaatggggtcccaactcagccacctccacctgcaactcaggcagttctggaatttccatgcagggggctcgagggtgacctgcaattaaaaatgggggtcacaggcagatacccaggatgagtctgcaactgtgtgttgactgagataatttggagcgaaccaatggcgacaacagagggtgtcagagtcccccctacccccatctcccgcactgccaaccttcttctcttccttcttctcctcaacccccactgggctttctgccctccagaccacctcctcccagacactaggggctgatttgcacagctggtggtcgaggcccctcctggcatccttggtggatccaacactgagtaaagttgccgaggcgagtagcgatgctctggtggaaggctccacatgcacattcaccccgaacagctgctggaaactggcacactctgctgctgtagaaattatcagcactgccacctcagctcctggagaaagtctcggtgtgacagcctgcaaagtaatcctgcatttgaatttcactgacaaatcctggcttcctccagacaagctccaacctgcacagatggcccctcgcatcaaaaagtaaaaataacaaagcttgcaattctgggcctccctttttctctgggcagatgtgctggctgcacatttcgggaatcgcgcggtctgagttccagcagcaacctctctcctcctgtacgctcgcactcgccccttctggcgtgctgctggggagcggccgtggcccctccgagtgtgttcagggaagtgtctgggatgcctgagccttttgagtgggagagaaagacccagaggggagagagtgtgaaaattcatcccccactcaagattagccatgttgtcatccataagacagctggcccagggaaggggttgcagcgttggagaaaggtctcaggtaaggtggtcagcagaggtgggggatgaggggcggctgcgctaagggccagccagtgcatgccaagtgcaggcggcagagtgggagatgaagctctagaagtttctgattttttgcttttttttccccaatcagatgcatcagaaggactgattttcttgcccaggctcatcctgaactcctggctcaagcaattctgtcaccttggcctcccaaaatgctgcgtttacaggcgtgtgctcctgatttttttgaatcccccaaaccttgaccagccacagaattctctccactcatatttgctgagaacctctggggatatccaggccctagggatatggttatggatgagacagacccagagagcacaggctcagggaacacacagccaaggccatctgtgagctgggtggccacagactcactgctcaggaatgccagagcaggaggccaagggagaggccagagacagggacctgcagctggcgacattgcgggagccacttacccgcaggtaggtttcacctttgatgagccatctgacctggagccaccaaggctcatccagaaatggtggctaaagtctttgctctactagagggtcagatgagataagatgttcagctgcaaggaaaagacaactcaaagtgccaggagaaaacaaggaattcatggattcgtatgaatgtatggattcaaacgaatggcccaggggcctatctagcctcaggcatggctggatcagggtgtttacattgctgtcctcaggaatccttgcctcagctctgaaagctgactgtgccgactttgttctccacgtggcatttgccagtagagaacagtgtctccaggcagatattcctcccagcaagtacctcctacccagactctccagcaaaagtcctggggatgcttctcattggtccagcttgggtcacatgcccatcccttctctaatcactgtggccagaggaatgcagtgctgtgattagccaggcatgtgtcaggtgtcagtctctggggcagagttggaataggtccatctgaactacctggctctgcagaaaaggggaagggatgctgggttggcaaaagcagcaagtacagaaacaataaagactctcccaaagcatgggtgactgcagagatgggagcatgctctggaacagctgcaaaaatcctgcttcccacagcaggattcttcttgctgcagttgtgtggccactgtcattcatcccctcagcgtctctaattccagcgtgctggcctctgtgccaggcccgggatatggggaaggttccgcatgaccgtgtggggaagcctgcctgccacctggcctcaggggtgggagcagccccctggggacttttcgcagttgaggtctgcctcacccctaaggcccctagtttccctctctggtgtctcttagatctccctgtgtttggatttccattttcctcttccttaaaccaacaccgtaaggtccaaccttcaggaccctgaccctggagagaaaaaaacagagaccaggaaggtcttcactagccaaagccccaggtctgggcttctcatgcacaaagcctctgtctgccacccacaaacccattcggggtagagttgccctcttgtagtggaataaaggacaagtgtggccaaacttgtttggctcttggtcctgggccgggggtggaggggagaaaacaggcattatcagagaagggcatgctgaggctggccagggggtatgtgaactgggagggggccagctggggagctcagcttccaggcccccacccaggcctatgtcgctgctctgatgtgtctcagtgagtgcaccgggcaagacgctgtttgaaggagcttccgtggaaacatccataaaactaaccttgagggaagaactgccgccctggctttactcctgtttagtcatttcattttctcacaatcctatggggtgggaatgatcactggccccattttagagaagaggaaactgagaaacagggaggtcctgcaacttgcccaaggtcccgcaacttgcgcaaggtcccacatggggcctggcttcagggcctgtgacaagacactgcatgagaagcccggggctggttgataggacttctcattaaccagctcataggactcccaaaatccaactgagggttggggcccagtcatcagcttttggggtttctggccctggggtggccctggccacataggcctgcatagggcatgcgttgccccgctgaagctcggcagcttagctcttctgccgggacaagcgcttcctaggaattctgagcacttctgccccctcccaggggcccctcccaggcctcctccgccgccagtccgggctgacagcttggctggccccaggctggggccgactctgaatgcggcgcctcctggtcacgcggcatgggcagaggaggaggaggaaaagggagaggaagaggaggaggggagaggagggaggccggcctgggtagaagtcagctccagctcctggaaggagcccacgcgtgctctagacgccttccctgcacggggctctgcccatcccccacctctgggaggagacagggtggccccggaggagggggcggcagtccggtgagcagcgacttggggcccgaggccccggccagttccattctcaccacgcccggcggaagctatcgccacgatttggggagggccgcctctgagcctcctctggaggcggcacctctgctactccattgcacaaacggggaaaccagccccgccgagcgtaccaggccaggccggccctgaggggcaggggcaggacgccaggagctgacccccagcgtccccgactgccagtgcccctgtcatgcaggccgaggccaaagcacgaaggggcctcgctgcaaaaggtcggacctgcgttgcaccggtttccagccaagtgctttgggcaagtttcttaaccgccttggcctccactttccccttctgtgaaataggatggtgcccacctgacagggttatcatgttcccttgggcagggcctggcaggctgagccaacgtcagtgtttgcgtggctagtttggttttattttttacgtattgttttggagacaaggtctctgtcacccaggctgcagtgcagtggtgcgatcagcgctcactgcagcttcgaactcccaagctcaagcgatcctcccacctcagcctcccaagtagctgggattacaggtgggcaccatcacacccagcaacattttttattattttttgtaccaatgagatctcctgtgttgctcaggctggtctggaacccctggccaacagcgatcctcctgccttggcctcccacagcgctggcctattaacgttttaacagaatgaactgaggctcagctgggccaacgcggaccccggcctgcgcccacgcctcaccggctccccagggcctgggaccggcacagcccgggctcaagggctgggactgccgccccgccctagagctcaggctgcgctccacgtgcgccgtgtttacccacgtgatgcgctgccccgccccgccccgccccgcgtctccccgccccgcgtctcccgcgccgcgcgtctgcagcctggccaaggcggatgctgggggttgggggcccgagcgcggcctcacgtcgcccggacgccccccgccccacccgggagactggagcgagccacggcctccctgggcgggcttggcccagccactccgctgtgtccgcgctgccagggcgcgggagcacttccgggcgcgcgccgcgggaggggcagggccgaagaggtgggggcggggccgaagagttaggggcggggccggagaggtaggggcggggccggagaggtaggggcggggccggagaggtaggggcggggccgccccttgcgggggggttctgagcggcccgcaccgcaaaaggcggtgtcagggcggtgaggggcggggcctggcaatgcacaggggctcttaggggcccgcactgcgggaggggcagggccagggcggttggtggactgggcctggctgtacgtaggtgctctgagaagcccccggcgagaggggcggggccagagcaacagtgggcggggacaggctgtgcgtcggagctccgcggggcctgcggcggggtgggtggggccagggcggcggtgggcgggccgtgctgtgcgtaggggcgctgagaggcccgcaatgtgagaggggcggggccggaacagcggtggacggggtctgtagttcaactgtgccgtggcgtcttcttcgcggcgagatctgagtgcctcgcagcagccgaaggcgggtttgcaggttgcgttgcgctggccctgccctcggcaggcagaacgggatagagcgcggacaggcgccgtcactcccagattcctctgcgtccatggcagagccactcctccttggtactccttccttgacccaccggggcccccttcctgctgtctctgcccctctagctgctgcctccaggggcttaggtctcggcccctttggcttctgggctgcccctggcagatctcgtccatcctaggttttaacgcctacctgcatgcggatgatcctgatagttctaacagtagctaaactgttttccacgtgctttctgaacattgatgctgtttggacccctgacagccacatttttacgcccccgcgcagcccgctgctctgagctccgtattccccgccggccgggtgttccacggcccttctgagtcaacgtgtgtgcagtgaagtccttcttccttctcgtttcaccctgggtctcctcctcagggagtggcatcacggtctgctcagtggcaggcaagccccagatagcgcttccgtcttgactcctcactctcctccctctgatctgtcccagaatcccatcagttcttcctccaccccacccgacccacaattctctgctacacttgtctccacggccctggtctgaaacacatgatgcttcacctggactcgtaggcgaccgatctttctgcctcttggcttactactcttaagtctcgccttcacgggcagtcgcagggatctttctcaagatctaatttctaatgattgcatttttcttctttaagcagtaggctgaaagccaaagctctccatctttttacaactcaaaaaaaaaaaaacaagggtgccctctgtctggccttgccactgttcaacctggtacttgcaagtcttgtccagtgcaatgggatgagaaaagtgagtgatagaaggatcggaagcaaaatgaaagcactgttattgtcaagtgatgatcatcgacatagaaaacaagaatcaacagaaaaattaacctaatgagagagttgcacaaaggtagtttaaggtcagaatagggccaggtgtggaggctcacgcctgtaatcccaacactgtgggaggctgaggcaggaggattgcatgaggccaggagttcaagaccagcctgggcaacatagtgagaccctcttcttttttttttttcttttttttgagacggagtcttgctctgtcacgcaggctggagtgcagtggcacaatctcagctcactgcaagctctgcctcccgggttcacaccattctcctgcctcagcctcccgagttgctggggctacaggcacccgccaccatgcccagctaattttttgtatttttagtagaggcggggtttcaccatgttagccaggatggtgtcgatatcctgacctcgtgatccgcccacctcggcctcccatagtgctgggattacacgcgtgagccaccgcgcccggccaaccctcttctattaaagatcagaggctgggtgcggtggctcacacctgtaatcccagcactttgggaggccaaggagggcggaccacttgaggtcaggagttcgaaaccagcctggccaacgtggtgaaaccctatctctactaaaaatacaaaaaatattcgggcatggtggcgtgtgcctgtaatcctggctactggggaggctgaggcaagagaatcgcttgaacgtgggatgcagagttgcagtgagccgagatcacaccactgcactccagcctgggctacagagtgaaactctgtctcaataataataataataaaggtcagaatataaagtcagtaatgggttcctccccaaaaataatacacgtattgtgagtaataaaaataaggtattctgcatgatactgaaatatttatgcattaacctaataaaaaaatgcacagaatctttaaggagaaaaacctgaaattctaatatatagattttgtttaaaaaggcttgaatacataaatagtgagataatgtcttaaccttgaaggaatgtaaattttctgttacatgatctaactatgcattgcaatttcagtaaaaattccagcccaattattttggaacttgagaaacttgattcttaacttttaaggaagaataaaaatccatgatctgctaagacaatcttgaaagaggacaaagggaactcttattcaacaggcattaaaacggattacaaaggcatagtaattaaaataaggtgatattggtacagaaaaacaggtaagtggaatagtttggagagtacagcataaactcagttatatatggtaacatataatatttctgtgataggaagggatttctcatgacctccaaatcataagctgaaaggtgagacgtgatggattttgactacaccaaaatgaaaaaatgttgctttgctacagacaaaattaacatatgagtgataagctagaagatattatccatgttttaaatgaacaaaaggctataactagaatacacaaggagcttctgaaaatcagcacaaaagagaaagagataggaaaccgaatttaaaaaataatgggcagccgggtgcggtggctcatgcctgtaatcccagcactttgggaggccaaggcgggcagatcatttgaggtcaggagttcgagaccagcctggtcaacatgatgaaaccctgtctctactaaaaatacaaaaaaaaaaaaaaaaaaaaaaatgaaccgggggtgtggtggtgtgcacctgtaatcccagctgctctggaggctgaggcacaagaatcgcttgaacccaggaggcggaggttgcaataagctgagatggcgccaatgcactccagcctgggtgacatggtgagaccctgtctcaaaataataataataatagtaatgataatgggccagatatatatatgccgttcacagaaagaaaaatcagaatgactgaggtatccagagaggctcattctcactggcagtcagaagaaggcaaggggaaggaatgagatgtcacattgccccacgagctgatacaactcagcaagccagatgatgtgaagtgctggcgtggatggatgagagagggagtcccatgcacttgtgagtgagtgtgtggccagttacagtgaaattaaatacgtgtatacttttgcagagctaggaccagggagaggaagggaggtgcttgggcacacacgtaaggaagcacttactgtcagggtcgaccccaccccttataaagccctgaaagtgagggctttcttagtttttttgtttgtttttgagacagagtcttgctctgtcacccagcctggattgcagtggtgtgatctcggttcactgcaacctctgcctccagggttcaagtgattctcatgctttagcctccggagtagctgggattacaggcgtgcatcacaccgagctaatttttgtatttttagtagagaccgggtttcaccatgttggccaggctggtctagaactcctgacctcaggtgattctcctgcctcagcctcccaaagtgctgggatagcaggcttgagccaccgcaccgggtctgttcttaaattttataccttaggtgccgcattgccttgccctaggcccagccctgtacgttccgcacagtttcactcttggttatgtacctaaagagacttcatcagaggtccacagcgttgcttatgacgtaggtatcccccagagggacctggacaggtagaacttggtacatgaagacaatgacaagtatttttacagagggcagggattccctagcgcttggcctctgggaaggagtttggggaacttggtgaaagacagctgagagcaaaatacaaaatgactttgttccagcttctcagaagtgagaccagagatgacatttgcatctgccttggagcgttttgtagatttctgagcctttgtcactgatcctcctgccttgcccccaataaatgcctttgaatttaggtagaaagaaagttggaagacgcccgcagggtgtctaagaagggttaggcatattttcactatgcctataaggaagcagaggtcagataaggaggcagaaactggagaattccagatcctgctcctctgtcaaggcagaaaggatttagagggcacagcttggactttggagtttacatatattccattcccttttctactctctagagatgagaacttgggcaggaaacccagccacagtgaactttggtgttcttcccagtgagatgggaataataataaggcctaactcagaattggtgttaggagtcaaaggagaaaggatatctgaaaccacttatcttcctccctcctcttctgtcaaacagcatagacaaatggagattccctgactttaaaaacaaaacaaaacatttttcagtcatgggacagcagtctaggggcctttaggaagaaactgaggaccaaaggatgcaactgagtactgtcagctcaagtggcaaatgaagtcatcagctccaggtagttcaagtcccagccccacctggctttgaggtgaggttgtgctttgagccggtaccattttggatgttgctcagctctggaatgagaggtggggtaggaagggtgtgatggttaattttaggtgtcaacctcactgggtaggagaagcccagaaagctggggaaacactgtttctgtgtatgcctgtgagattgtttctggaagagactagcattagaatcaagagactgagtaaaggaagtgtgccctcaccaatgtgggcaagcatcatccaatctattgaggacccagatagaacaaaaatgcagaggaagggtgaattctctctccttgagctgagacatccatctttagttcccggacatcagacattggagttcctggttcacaggccttcacgctctttgttgaaagaatttttttttttttttgagatggagcctcactctgtcacccaagccggagtgcagtggcacgatctcagctcactgcaacctctgcctcctgggttcaagcgatcttctgcctcagcctccccagtagctgggattactggcacctgccactgcacccaactaatttttgtatttttagtagagacggggtttcaccatattcgccaggctagtcttgaactcttgacctcagatgatctgcccatcactgcctcccaaagcgctgggattacaggcatgagccaccacacccagcctgttgaaagaaattaaggaagacctaaataaatggagatatacatctataccatgttcatgaattggaagacttggtattgttaaaatgtcagttcttcccaaattgatctatagcttcagtgcaatggtgagagttacaccattggcttcctgggttctcaggactttggacatagactgaattaccccattgtctttcctggatctccaactcacagatagcaggtcatgggacttctcagcctccataactgcatgagccaattcccataataaatctcctctttttttttttcttttttttgagatggagtttctctctgttgtccaggctggagtgcagtggcgcagtctcggctcactgcaacctctgcctcccaggttcaagcaattctcctgcctcagcctcccgagtaactgggactataggcgtgcgccaccacggccagctaattttgtatttttagtagcgatggggtttcaccatgttggtcaggctggtcttgaactcctgacctcagatgttcctcctgcctcagcctcccaaagtgctggtattacaggtgggagccaccatgcccggccccatactactttgattagtatagctttataataaatcttgaaatcaagtagtgaaagttctccaaatttgtctatctttttaaaaaatagctttagccattttaaatcttttgcatgttctctctctcttttttttttttttttttttttgacagaacgaagctgtaatgcattctcatttaaattttaacatcagcttgtcatatgctaccaacaaagcctgctgggatatagattgggattgcactgaagctgtagatcaatttgggaagagctacattttaaaaatattgagtcttccaattcatgaacatggtatagatgtatatctccacttatttaggtcttccttaattaattaattaattaaccttgtttctttttatgagatggagtatcactctgttgcccaggctagagtgcagtggcacgatttgtgctcactgcaaccccctcctcctgggttcacacaattctcctgccttggcctcctgagtagctgggattataggtgtgtgccaccacacctggctaatttttgtatttgtagtagagacgaggttttgccatattgaccaggctggtctcgaactcctgacctcaggtgatccgcccgcctcagtctcccaaagtgctgagattacatgcgtgagccactacccctggcccttcatttctttaaatgatgttttgtatgttttggcataccaatcataaacatattttgttagattcatccctaagaatttcactattgatttatttacttgtttatttttagagttgctgtgtcacccagggtggagtgcagtggcgtgaccatggttccctgcagcctggaggccctgggattcagtgatcctcccacctcagcctccccagtagctgagactatgggcacactccctcatgcctggctgatatttcattcttcaagtgtcattttaaatggtattgattttaaaatttcagtttctagtcacttctatttattttatttttgatacattctttcagattttccacacagatttgaccctggggtttgggtatcagtcacattttcctgtgcccaagagatggggaggatgtttctcaagggaggacttgcacacttgatggggcctcttactctgcaagagcaggatgaacaggggctagtgtggtctggtaactgcgactcaggtggaagcatggctttctcagctgatgcctacaagtgtagatgtctcaactgtaaccagtggatttccacatcagagagcaacaagtcttgtttctcatagtttctagttctctgctgagaatagttgtctttttatacatattgatcagagtttcctttgtattcatctgtgtagttatgagagctgccctaaagttaccatctgctagtttcatcaccacaggtcactttttatgtcgtatccattggttttcttttctctggagtttgggtcttgttttcctgttttcacatgtctggtaattttggattttatcctggatgttgccatgacatgttgcagagactctggactctttatactttaaagagtattggttcttcccccaccccagctttattaaggtatagttgatatataaaaatcatagatatttacaacatgatgggtttttaaaaaaatttttatttttggtttgggggcacatgtgaaggtttgttacacagataaacagggtttattgtacaacaaatgggggtttattatacatattattacatcacccaggtattaagcccagtacccaatagttatctttttttgctcctctcccgcctcccattctccccctcagtgtctgttgtttccttcttctttgtgttcataagttctcatcatttagctcccaacatgatgtttcggtatctgtatacattgtaaaatgattccaccaagttaatcaacatatctaccacctcatatgcttatcgttttttttgtgtgtgtgtggtgagaacgtttaagatctactgtcatagcaatttttaaatatgaagagtattgatttttttgtttaagtaggcaattaacttggctaaacttaacatgtaaactctctctcccctatagaggatgacagttgaaatctgaagttcatttagccttaactgctgcttaatgacttcctcactcatacctgattctggagttggcaagagatttgtgcattttatacatggatttggggactccccttctgtggctctttttttttttttgagatggagtctagctctgttgcccaggctggagtgcagtggcatgatctcggctcactgcaacctctgcctcctgggttcaagtgattctcctgccttgacctcctgagtagctgggattacaggtgccctccaccaggtccagctaatgttcgtaattttagtagagacggagtttcaccatgttggccaggctggtcttgaactcctgacctcgtgatccacccgcctcggcctcccaaagtgctgggattacaagcgtaagccactgcgcatggcttttctctctctttttattttttttttttagaaatttcgccagtcgtttttgttttttgtttttagtttctgtaattacagtgacctttagtttttcaagccagtaagtttgtttgtttgttttttcttttttgagatggaatctcactctgtcacccaggctggagttcagtggctcgatttcagctcactgtaacctccacctcccgggttcaagagattctcctgcctaagcctccctggtagctgggattgcaagcacgcgccatcatgttcggctaatttttgtatttttagtagagatggggtttcaccatgttggccaggctggtctcgaactcctgagctcaagtgatccccccgcctcagcctcccaaagtgctgggattacaggtgtgagccaccgtgcccagcgcaataagacttttctacccaagaatttctatctgagtcctgcatggagtagtcctgaatggctcagatccatcagaagggaaacttgcccagtgctgttctcttctaagtattgattctcctgcagtatctgcctttttgttgctgtctggggacttcagttactgttcggatttgtggctgttagctccggaagggttgatcagatattaggtagttgaccatgacaagagcaggacctctgagcaacgacgctgtcaacagtgccatgactctgttagtccttgaaactcagaaggaggaagagggtggggaggaaagtctaaactggctgaatttaaatctgaaatgactgaacaaagctcaaagtttctgagaaaaccaccatctgactagattgactcttcggccatcgtgtaaaattttcagttatagaatggtagagaaaagtgcattttcccatctacatcttgtggcctgaaaatatcttccctcctgcatataggaaggaaaaaccttgaaaatggtggatgtgggatcggggagaggctggatgaaaagtagttatatcttccaggtactgagttttctcatgcatagaatggtggggttgagggaagtctagaagattccaaagtctgttctcgctcgcacacttacactaagtgctttttacgaacttctgaggccacaaacttctgccctgacaagagtctctccctgtgaaaaaggggtggaagtccagtgctggagatgccttccaaggctgtaggcgcccctccaccgcttctgaggccctgcctctctcaggtcccaggtctctgtcagaggagttttggggcagagccggagctgttgaagggtggggcagccagacattccccagagctctttcctgtccagattcgatcagacctgtggctttttcaggagaggacagtcaggcccttgggcagctgaacctgatcagcttcccttactctaccttatttcttcctttaatatttttatttctttttagaacttcagttcctgtccctgcttaggagaggggagttgtccattagacagaatctacatctaccctagattcttctatcactagttttttttttttcccaagtctagcttagcagtaagctctaaggtcccagcctagcaaggctgctgggagaaagacagcctctttcccaggaattccagcaaaagtctcagggctgagcctcattaatctgtcttcggtcatgtgaccatccctgagccagtcccggaggctggggagatgaagggccctgattggccagccctggtcatggccacccctaaagtcagggccagaggtaactccatcccaatcacctggacagaagggggcttccccaaggatgagggcgggactgttaccaagataagggagatgcatgctgggaggatgaaatcaacagacttccacaacataagtttttctcaaagttccggatccaggattcacgagtgttgcttgccctgtgccaggcacttcctttaccttttgtatctagttattttatcccaagagatcatgttgttccagacagggaactgagcttagaaagaggaagggcctttcccaagccgatggcacagggtctgcacttcctgcctgggaagcaggcctggggcttcccacgtggcctgacccctctcatctgacacctgccccccactccctcccctctgcctgcaaaactgacatgaggagactgcttgtgtttccagaaagaggggaattggcaatagccatgagttgagacgacttgataaaatatttcttgttttctcgagtttacatagaccaagttttcactgttgctatggggtgggttggcagagagatgaaaataaatctgtgtaatttattttttctctgagtggagtatatttctgctggcttcatacacatgcacacacgcgcgcgcacgtgcacacacacatgcccgcacatacaggctttcataaaatacttaaacccctctaatgctctctgtggaaggaataaatatgtactgtactttcaacttgtgttctctgaaataccatatggtctgcactgtgagcttaaaatactctagtgagcggatgctttcatgcagcagatagccaggtggagctctccctgccaatcttacaacgttaattaatcctttaaaatagagcgtggaggggtccctgcgtcagaaacgggtgctgtgtgagggaagtagcccggtggcctgcaccggggctgagcagagagtacaaaggcggtgggaaggtgggctaggccgggagcacccctgctgcctgacggcgcctttgatgagcccgctcagtcactcagatactcacagtttgcattctgcataatcagtctaacaggctgatggtttgcatgaatatctaagtttgtcattgtggttaatttttcctcaaaaagaggccccctatctctctggcccaatgcatatttataaagggcagggaagtcaggcagaggatgctggatgaaggggcggctcagggagggggccccgtggccggtccctgaagcctgggaggccaggctcctgccagagctggtggctcagagaagggtgcagagctcctcagagcctggagggaaggaactgcagggagaggggacagcctggtttgcaaggccccatttgggctagcctcttccctgctccaggcctcagtttccttatccatacaaggagcatgtgggccacttgatccaggcctcagggtcccaaaggaactatcctctccaaatgaggttacacagagtcagagaggggagggagagaggctcacatccattcaacaactttattatttatttatttatctacttttctttgagatggagttttgctcttgtcgcccaggctggagtgcaatggctcaatctcggctcactgcaacctctgcctcccaggttcaagtgattcctgcctcagcctcccgaatagcttgtattacaggcgcccgccaccacgcccagctaattttttgtatttttagtagagacggggtttcactatgttggccaggctggttccaaactcctgacctcaagtgatccacccgccttggcctcccaaagtgctgagattacaggcatgagccaccatgcccttgttaagctgttaagcttacttaacaactttagtggtgtgactccttcccagagcacctgtggtgctccacgaccaagtatttttataggttaaaaactccagttatcttgtaaaaaacgtaattgcattatgttgtatatattttggtgtaaaaagcattaaattgctcgttttaaataggctacggttatttttgttttcttttgtattttgtttttgtgtttgacacagggtcttgctctgtcacccaggttagagtgcagtggtgcaatcatagctcactgcagccttaacctcctgagcccaagcaatcctcccacctctgcctcctgagtggtcatgaccacaggtgtgcaccacaatgccaggctgattttttttttttttgagacagagtgttgctctgttgcccaggctagagtgcagtggcatgatctcggctcactgcaacctacgactccgtggttcaagcaattatcgtgcctcagtctcccgagtagctgggattacaggcatgcaccacacccagctaatttttgtatttttagtagagacagggtttcaccatgttggccaggctggtgtcaaactcctggcctcaagtgatctgcctgcctcggcctcccaaagtgctgggattacaggtgtgaaccactgttccggcctgagccactgtgcctggccctggctaatttttaaattatttgtagagatagggatctctctatgttgctcaggatggttttgatctccagtgctcaagtgattctcctgcctcgacctcccaaagtgccggaattacaggtgtgagttaccgcgcccagccagctatggtttttgtaaccttgttttggcattttttttctgactcgtcaaagaatatttcggcaactttggagtggccaggcttccctttcccatgcgcagcaggaagtccaggtgggaatggggagaggctgggagatccctcaggtcggcggctttcagagctctccaggccacgcctctcagtggccagcaggtggcagttctgagccttccacctggccaccctccttcctccacccccggggtgcccgtccccccagtccacataccacagagtcccaggtggctggagagagctcctggcttccaggccctgggccattctgagaagctggatgaggcagcctagtggccatccagctgcccctgcctgggactgcctgcctaccccttcccatccttggctccatgctaaaggaaggtgggcttcctggaggagctgacatcttaagtgagacctgcaggacaataaaggatttcaggcagagggaacggaatatgcccaaatccagagaatccagaccctgtgctttcaggaactggcaggaggctgatgtggctagaatgcagactgttgggcttgggagagggactagggaggccaggtaatgcttggcactctgggagcagcaggaccagggcagcccgagtctagacattatcttgagggcagtaaggagccctcagcccattctaacccatcagagttggcctccggaaggatcgccatggctgcaaactgcctagcctctcatcgcccctcacccgctgtcactcacacacctgggcctcctaccgtgctggccaggaaagagctgcaagtcctcgggcccgaggctcggcaggcagccgacctaccttgcagtcctcaggagaagctgtccaggaaccccaccctcctgagctcccggggctttggtggggaagggagcctcccagggtcccggagcactaaacaaaaaggagctgaaggtcaccacactttggccatttgcagggagcccttccccacacaggggcggcatgttcccttgtggctgccagggagcccccaacacccctgggaagatggcaggtcgaggggaggggacatggcctgaaaacaaggaagcagtctgcaatggggagatgtggggcatggggctgttttagacagaggaggcggcaggtgcgcgtatgtaggtttgaggtagattttgctacccaggaaatgggctcttgcctcttccacctgcctgtgaactggccctgggacccagcaggagaggctcccctgagtgacttgtgacattcttttttttttttttttttgagataagtctcattctgttgcccaggctggagtgcagtggtgcgatctcagctcactgcaatctccatgtcctgggttcaagcaattctcctgcttcagcctcccgagtagctaggattacagattacagatgtgtgccaccaagcctggctaatttttgtatttttagtagagatagggtttcaccatgttggccaggctggtctcgaactcctgaccccaggcgattcgcctgcatcggcctcccaaagtgctgggattacaggggtaagccaccttccccggccaacacatggtgttctgaaacagcacagcctagtgtaacctcaattggtaattaattaattacactccccaggtgtctcctggagtccttcctgtaggggaggggaggctgaggctgcagaggccccattcagagggctgttgaatgactcatggctgttgagaagtaatgtccactaaataacatctgattctgtatttaacatttaaatatttaattaactaaatgggccaaatatttaatcaagcaccatcaaagccactgtgagcctccactttgcataattccaaggcaggccagcttccctccgagtccccatcctcatcctgacagtgctatcagtgcccctgcctggtgggaaacatacccattctggtacccaattctttttttttcagagacaaaatctcactatattgcccaggctggtttcaatttgcccaggctggtttcaaactcctgcactcaggcaatccgcctgcctcggtctcccaaagcactgggattacaggtgtgagtcactgtacccatccatccgataccacattccgagactcagggcatctcatgtcctaggcaaagttgcttgtttgcttttgttttgttttgtttgtttttgagtcagggtctctctctgctgcctaggctggattgcagtggtgcgatctcggtccattgcaacctctgcgtcctgggctcaagcgattctcctgcctcagcctcctgagtagctgggattacaggcgcgcaccaccatgcctggctaatttttgtatttttagtagagatggggtttcaccatgttgcccaggctggtctccaacttctggcctcaagtgatccgcctgcctcggcctcccaaagtgctgggattacaggtgtgaccaaccgcaccccaccacagttgtttgattagactccaggtttgctatgctggagatagagttccccccatggccaccctttcctctcctctttctctttcctccccaagtagacacaattgagactggctgctgggttcccctggaggcagtgtggtaccagtcttcctgcctctgatgacagattcaggccttgacaacaggggtgaacatgtgacccagtctggaccaatcagaattcttctccaggatttttgtaactggagttaaaggcgggaagacttttttgagctggacttgctctgtcacccaggctggaatgcagtggcacaatcatggctcaccgcagcgtcaacctcctgggctccagtgatcctcttgcctcagcctcctgagtagctgggactataggcaagcaccactgtgcccggctaattttttttatacagacgggatcttactatattcccagagatggtcccatggtgtcctaatctctgcatccagctgttcctgaagatgggcctaccctgatctttctatgggagggcaggtgaaccaataagtgccctatgtctttaagccagtggaaatcagttttctatcacttgtatccaaaagtgccctgaccaatacctactccaccattatagtcatgtagcttatgtgcaaataaaatgacttttaattatttaactgtaaataatacttgtgttagattagtgcaaaatctttgtgcatttacttttcagccaaaaccacaattacttttgcaccaatctaatatctaatagctcatagctcatattcctaccagtaagtttttttgtttttgtttttgttttttttttttttttggagacagagtcttgctctgtcgtctaggctggagtgcagtggcgccatctcagctcactgcaacctcctcctcccgggttcaagcaattctcctgcctcagtctcctgagtagctgggactacaggtgcgcgccaccacacccagctaatttttgtatttttagtagagataggatttcaccatattggccaggctgctctcaaactcctgacctcgtgatctgcccgcctcggcctccaaaagtactgagattactggcgtgagccaccacgcctggcagcaaggtatgtttaggtttccttgaatatgtcctcggctcttcagaatgaagggaggatctgagcctggaaggatgggtccctctgacacctgctatcctgctgatgaggtcagcgtgcttctggaactgctgaatcctggggctctggtgacgtcaccatctctctctccctcttcctctccccccaccatgcctcaccacaccccacctcttcctgggctttgcttttcattatattggcttcgttatcctgcaagtgttcttccagttgtagccccagcagctccaggcttacactgtccttgcgagaaatccctgtggaagagggcagttttttttcccaatagaaccacaaaggtggctaggcgcggtggctcacgcctgtaatcccagcactttgggaggctgaggcgtgtggatcatctgagatcaggagttcgagaccagcctggccaacatggtgaaaccccatctctactagaaatacaaaattagctgggcgtggtggtaggtgcctgtaatcccagctacttgggagtctgaggcaggagaatcgcttgaacccgggaggcggaggttgcagtgagctgagatcgcgccattgcactccagcctgggcaacaagagtgaaactccatctcaaaacaaaaaacaaaaaacaaaaacaaaaaaacccacaaaggtcccaggaaaggctctgattggatagacttgggttatgtgcccattcctgaacaaatcaccgtggccacagggagaatacatgcattggctcagctgagcaacgtgccaggcagagggggaaatggaggaaggagcactgagagaggggtggttccctaggaaaagttcctgtggtgctgttgaccacaggaagagtgaggggagctggccagtccagtgacaccctgcctaggaagcttctctaccctggagacttcaccctgcagagggtgccctctgggtgctagaaatggaggtgggactgctgcaggaggggaggaagcatgaggaatgtgtgtgttccacagtctagagaagcaccagggctatcactgcttatccttccccttgtggcagagagtgggtgggagggtatttctatgcaggcagttatatagtgtggactgaaggggacagggagaaagcaccaagaaagcccttactgtatacaggacagtcactctgagagacttggggcacaattacttactgagctgcccagggaattccctgcattttggccattaccatccaagacttcgtgaatccattttcttgctggtgggagcataaattgttacaaccagccttcacggggggcaacgtggcaacattgattacatttaaaaatgcacagactcccagcactttgagaggccgagatgggcagatcactgaggtcaggagtttgagaccagcctggtcaacatgaggaaatcctgtctctactaaagatacaaaaattagccaggtgtggtggcatgcacctgtaatcccagctattcaggaggctgaagcaggagaatcactttaacttgggaggtggaggttgcagcgagccgagattgcaccactgcactccagcctgggcaacagagtgagattctggctcaaaaaaaatagtaataataggccaggtacagtggctcatgcctgtaatcccagcactttgggaggctgaggcaggcggatcacgaggtcaagatatcgagaccatcctggccaacatggtgaaacaccgtctctactaaaaatacaaaaattagccaggcgtgatggcacacgcctgtaatcccagctactcgggaggctgaagcagcagaatcgcttgaatccgggaggcagaggttgcagtgagctgagatcgcaccactgcactctagcctggcaacagagagactccgtctcaaaaaaaaaatatatatatatatagtaataataaaaataaaaaataaattaaaaaaagaagctccctggcaattctaatgtggcccagaccctctggtccagatttccagcccctgcagaattcctggtctcctcttggctccaccccagcacacaccaaacctggggttcggggtgcggccctttctccttgatttcccctcgaaagtgtccttcccctcctgctgggtgctgggtgaggccagctcacggtggagtgctggggaaggagtagctcaccctcacaaccgcccatgcaggagcccctctctgtcctccccctggaaaagggaacttggcattctgtgtagcactgctggcctcaggaaacctggtgggctgcatgcccgcatggcctgagaggacactgccagcactcagcagaagggtcacgttggccagctcactccctgccagcccctgaagtcgaagctgcctgaaactgcggtgctggtttgccactgccaggagatgccagcagcctaatttacatggctgtccagggtacccccagccatgcgacagccaggaaaactgcaccccatcttagaaaactcaggaacctgagggaggaagtccaaactgaaaaacctcaattagccaggcgtggtggcttgtgtctgtaatcctagctactcagaggctgaggcaggaaaattgcttgaactcgggagatggaggttgcagtgagccgaatcatgacactgcactccagcctgggcgacagagcgagactccatctcaaaaaaaaaaaaagaagaagaagaaaaagaagaagaggaagaagaggaagaggaaaagaagaaggaggagaaggagaaggagaagaagaaggagaagatgatgaggaggaggaagaaaacaaaaaacaatacaaaacaaaacaaaacctgttccaaacagcaggcactgctgaggaaggaaaagaactttcacaaaaaagtaagacagagatgaactggtagttgcatggtcggggaggactatcaggaaccaaaagaatcaaacgacttctctgtttaaaaattcaactgataaacccaggaagggaatgatcactgctgagaaataagttgataccatgagagttcaggtggaaggaaatctcaccgcaatgcaaaaccagaaaaagatttggaggacaaaccctgatgatctaacattcaaaaaagcaaaagagaaggaaaaaaaagatataaagggaaaacgataatcaaataattaatcaaagagcattttcttcctttctttttttttttcagagatggggtcttgctatgttgttcaggcttgagttccatgactattaacatgtgtgattgtagcatactacagcgttgaaactcctgggctcaagcaatcctcctgcctcagcttcccgagtagctgggtccgtaagcacacaccactgtacccagctcctaattaaagaacattttctaagctggcgaaagccttgattaaaagggccgatagagttccaggaaggattaattgaaaagacatatacttaaaacagaccctggtgtaattcctgaattatgaacttccagacagaaagtaaggttacttacaaaggaaagaaaaatcacgttgatgttggctttgtcatctgccaccctggaagtcaggagacgaatggaacagtgacttcagggacaaggacagtgacccaggaatcctatgtccacaagagatatcatgcatacatcagggcaatggcaagagatttttctttttatttttatttgttttgagacagggtctcactctgtcactcaggctggagtgcctggtgtgatcacggctcactgcagcctagactggctgggcttgagcaatcctcccaccttagcctcccaagtagctgggaacacaggtatgtgccactgtgccccactcattattttaattttttttttttttttgtaaagacgggtctcactgtgttgccaaagctggaagagattttaaagtatgcaaagacttatatcctctctggggaaaatgctaaataaatactacagccaaaaacagatacactgggccaggcacggtggctcacatctgtaatcccagcactttgggaagctgaggcaggcggatcacttgaggtcaggagtttgagaccagcctggctgacatggtgaaatcccatctctactaaaaatacaaaaattggcctagtggcaggtgcctttaatcccagctacttgggaggctgagacaggagaatcgcttgaaccctggaggtggagattgcaatgagccgagatctcgccattacactccagcctgggcaatatatccagactccatctcaaaaaaaaaaaaaaaataagtccacaaaccctttgatgatcgtcccttcaagatgtggatcatggaccttaatttccctccctggtagtgtgggacagacctagtgacccacttctaaccaagagaatctaagagagtgacaggatgtgactgaggttaaagcataaacggtacgaggagttcctctgtctctcatcacttgatgtgagggaagctgtgttgtgaacagccccatagatgcccttgggacaaggaacagaagtctcctgccaacagccacatgaatgagcttcaaagaggatcctgcagcctcagcccagcctcagagggctgcagccttggccgacacccggttacagcctcctgagaaaccttgagctgggaccatttagcagagctgctcctggacctgacccgtagaaactgtcagataacaaacatctcttgttgtaaactgctaagttttggggtaatttgttaccctgccatagataaataatacaatctgtaaagaaacacaaatttctatgttaacagtggagaggtacccattaaaggaaatgaaaagtattgtggaatttctgaattaatacgggtaaagaatgatgaaaaacctgagccaaccatcaaagaaaagtaaatgggaaagggaaaataacaataatttagtaagcataaaccagaaaaatgtaataaaatcagtaaacacacaataagatggaagaggttaaacccattatatatcatctatcattataaattatgaattttcctatcaaattggaaaaaaagaaaattcaagtagatgctgtttatatgaggcacatttaaaataaagacacaatgaaaagttgaaaattaattgttgagcaaggagttaatggaaaaatgcagacaaaaaaagaagcatagtggcagtatgaagatgaatcaacatggaatccaaggggcgaggtcctgagcagagaaggagattatgaaacatggaagtgcaattcacagagaaactaaagtcttcagaaacatgtatgtaccaaataatgtggtagccaaacacataaagcaaaactcccaggaatacacagagaacatggtaaaaatataattataatagaaggtattttaatacaaaggactaattatctgagtatctattattcaagtccctgtaattataagactgctttgaaaaacaaaagtattcctggtacaattacagcagcaacaataatgataataagaaataacaaacgttaagctcctatgatgcgccagccaaggttctaagtactttacatgtactaacccttttggtccttaccacaaattatatgtcatgatttattactatctgttagccaagatgactataataatttcttccatccttgtatatacaaacttttgcaatgtgactttatcaattcctcttttaagaggcagaatgtatttttttttttttttgagatggtgtctcactctattgcccaggctggagtgcagtgatgtgatctcagctcactgcaacctctgcctcccaggttggagtgattctcctgccttagcctcccaagtagctgtgactacaggtgcacaccacaccaccatgcccggctaattttttttgtatttttagtagagatgggtttttgccgagttggccaggctggtctccaactcctgatctcaggtgatccatccacctcagcctccctaagtgctgtggcgtgagccactgtacccggcctatttttatttctttttttgagatggggtctcattctgtcacccaggttgaagtgcagtggctcagtctcggctcactgcaacttcctcctcccaggctcaagtggtcctcccacctcagcctctcagtagtggggactacaggtgcgaaccaccaagcctacctaatttttcatatttttgtaagagacagggtttcgccatgttacccaagctggtctcaaactcctgaactcaggcaatccagccccctcagcctcccaaagagaatctatttttatatccatgaatctggtctggctttgcaacttgctttgacaatgggatgttgtggaaattactttttttttacttgtgagttagccctcaagacactgcacagcttccactcttggtctcttggaacacttccaccatcgtgtgaagaagcctgggctgggctgctgaagacctgtagccaaacacccatcatcagacatgtgggtgaggcatcttagaacatctggtcccagctgagttgctggataactatagctgcattagtaaccaaggacaagatcagcagaagagccatccagctgagcccacaccaaactgccacacacagaattgtgagaaaacaaaatggtttttgtttaaaatttttgaactggtttcttttgcagaactagacaactgagaaaccattcccattttgcaaatgaggaaatagaagcacaggaaggttgagtaatttgcccaaattttcacagctatgattatgattcttagttaagtcgtgacttgaatccagttactaatgaattgagcttttataaaattattattcactcaaccattcctcccagttcactgttagcatttatcctggacaaatgcatcagcatttttgatggtcagcctctcaataatcgtagaaataccccatagtacaatataattcaagtcaattacaaagtgaaactacacattttgaaaaaaaaaaaaaaaaggattttatgaaagagcaatattgggtgaggtgctggtggctcatacctgtaatcccaacactttgaaaggccaaggtgggaggattgcttgaggccacgagttcaagaccagcgtgggcaacatagtgagagcttgtctcagtacataaataaaaataaatggtttgattattgtgacagaagttgtcaactgttacccaatattcattctgttttcactgacatgaacccagttttgcctagggtggtaatgtactcagctaaaaatcctctcctcccagactcttctgcagctaggggtagtcgtgtgatggtgtttcggccaacgtaacatgaaaaattctacttgtggggcttctgtgaaagttattgctttcccgataaataaggggcagactaaggtggctcaaacctttttgccttgagtcatgccccctttgaactggaatgtggatgagattcctagaggtgcagctgctaccttgagaaagcaaataggaaaccttcaggagggtgaagcgggggccagaagggccacatctgtgatgtttttcgtgtgcaatggcaccagcccatctgtttgcctttggattttttttgtcatataagaaaaataagctcctagcttgttaaagttgctaaattgggtttctgtcaaatgcaaccctgactgatacaaatagcaaaggattaagagaggcccttaggacgatagctgaagccatcaattaccttttgcaaaacacagtagtattgcagaagtcagatgtgaagtgaagggtgtcttgtcatgatatcacacaattttattagaaaaattatactttcaaaaagtcaacattagatttattatttctaagcaaactttttattcaagtataacatacctatgggaaagtacactggatttatatttgtcttaaaaatgacattgttgcaattataacctaaatttcagtaaatattagataaagtaaatgtcttttttgtactacttggtttcatgtctcggtataacattatgcatgaaattttgccctcccccaagtggattcacgctaaagtgttttttctttttcctctaatacaattatttttggataatgatgatgacttgtatctctttcagaaagtagtagatttctgtagaaaggcctctgtaggaggccgggcgcagtggctcacacctgtaatgccagcactttggtggccaaggcgggaggatctcagggaatcaagaccaaaaaaaaaaaaaaaaaattctacctgttatcttctctgatcatatcctagtgaaaacagaaagcaacaattaaaaaaaaaatccctaacgcggtgaaaccccgtctctactaaaaacacacaaaaaattagccggacatggtggcgggtgcctatagccccagctactcgggaggctgaggcaggaaactggcatgaacccgggaggtggagcttgcagtgagccgagatcgcactattattgcactccagcctgggcgacagagggagactccgtctcgggggaaaaaaaaaaaaatccaacccccacccccaccccccggccctcccactgcccctgcctgctcccctcaagaatcattgaggaaaacaaacccgtaatacttacttggaaattcaaccatttctttttttctttttttttttttttttttttgagacagagtctcgctctgtcacccaggctggagtgcagtggcgcaatctcggctcactgcaacctccacctcctgggttcaagcgattcccctgcctcagtctcccgagtagctgggactacaggcgtccgccaccacgcccagctaattttttgtatttttagtagagacggggtttcactgtgctagccaggatggtctcgttctgacctcgtgatctgcccgtctcggcctcccaaagtgttgggattacaggcatgagccactgcgcccagcctcaactatttcttgacatgtggatcaaaaaaggaattaaggagaagaatttttttttttctgagacagagtcttactctgtggctcagtctggagtgcagtggcaccatctcggctcactgcaacctctgcctcctgggatcaagcaattctcttgtctcagcctccccagtagctgggattacaggcatctgccaccacgcccggctaatttttgtatttttagtagagatggggtttcaccatgttggccaggctggtcttgagctcctgacctcacgtgatccacccacctaggcctcccaaaatgctggaattacagatgtgagccaccatgcttggcctcacagacatttttaattgtaattaaaattatagttactttgcaaaacatgtaacaatttgtcatcccaccagcaatgaccaggataggtgtccacttccccacaacctcatccaccttaaatgctagtgttcttttgaatttttgtcatagtcacaggtactgttctggcaggaatgttcctgacactttgagaggctgaggatctttgcacatgcttgtaggatgtctggagctcctcttctgtgaattgcctcctcctatcttggcccatttttccacggtgttgtttgcctttttgttatcagcttgtagaaggcctttgtttattaaggtcaaggaggcccaggaagtggagccagccttgtgagcagggagggttctttctggggcaaggggcagatcagaagatctgatagagagcccccccccctccaactacgtgctcacagtgtgttcaggacttacagaccacagagcaggaatgtgcagggctcaggtcagcattagggtcaggttcttaggaaaagaaagagcaaaaacaatgaaacacaatacaaagtaaagaacaaacacagtgagaaaatataacataaaataaaataaaggcagtaaggccctgggcctgagaccctgagaaaaagctggtaggtcttagtccacaccctgccccgtgtttccttccttttaaatgtctgcagcaagcattcatattcccgtttaatgaaggatccggccaaacacggtagctcatgcctgtaatcccagcactttgagaggccgaggcaggcgcattgcttgtggccaggagttcgagaccagcctggccaacatggcgaaatcccgtctgtactgcaaatataaaaattaagcttgaacctgggaggcggaggttgcagtgagccgagatggcgccactgcactccagcctgggcaacagagtgagactctgtcttaaaaaaaaaaaaaaaattagccacgcgtgatataaaaattagctgggcatggtggcgcgcgcctgtaatcccagctactactcaggaggctgaggcatgagaatcgcttgaacccgggaggtggaggttgcagggagccgagattacaccactgcactccctcctgggcgacatagtgagaccctgtctcaaaacaaaaacaaaaacaaaacaaacaaacaaaaatccccgtgacccagcccagagaggaatgacagccaggaatggaactcgaggtttcattccacaccacaacactgtcttttaattttttattgttttacttctcttcattgcattttgttttatttcattgtttttaccctttctaaggacttgtgaataaatgcgtggaactgcaatgtgcatacagtaggcgcccaagcgggggcagtgcagcccctgctccccgcccgcgggtgccttcgctgatgagcctgaggcgggcagcccagccctcccgcccgtaggcagcctgactccaggccaaggggcagcggagagcttcggggctgcgcgcaggagcgcacggccaggtgggctttttatggcgcgggccgaggaggtcattctttttagtgggctgtacagcgtccaccgcgaggcactttatttttagcttcttgaaggctacgatggagccgcctcctccgctttcccagtgcttgcctccacctcccccttgacgcccgggtgcccgcggctgctcctggctgcagtgtcccgatctgtgtagtgcagggtccctctagaggtccccgggcaccctcaactctcagcccccgtcccctggcgcagaatattccagctcccgggtcatggccctccacccccactcgaacctccatcctgttctgcgcccgtcctgaattgctctttaaaatagtaataataatttccactttgattttggattcgttgggggggggggggttacacgtgcagatttgttacacgggtgtactgtgaggtttggggtacgaatgatcccgttacctagatagtgagcatggaacccagtaggtggtttttcagcccttgcttcgcccacaccccgtggtagtccccagtgtccgctggtccatctttgtgcccccgtgcaatgcgttgcccttgacgggccaggtgatctccccgaggtgggagcctggccaccctcccccattctgcagccttcacctccaacacccagccagggccagctcagaggcgccctgacttgcccacggggcctgcacccatgctcgcccaaacccctcgcatccagcactgcaggccgggttctgagcgtcgtcgggcgtggtggagctcggcggggcccagcgcgggccttgccgcggggacacagggcagggtcgcgctctgccctctgccgccactccaggtcagcatcctcagggctcgcgtgggtgacggcccgtctcgtagcgggggtgagctgggctggtccgaggggtctccgcggcctccccagccacagtccccgcccgctccgcgccctccccgcggggtcgatggctgggggacccggctccggcccaagccaatcagtccttcctgagcagcgtgaggtggctgcccgagggcgggcggggtgctgctctggcgggctcctggaggcctgggtggcgcagcccgggggagcggagggaggaggcggccctgagaccgagccgcgcggcgggtgggctcccctgaccccgctccgacccggccccgcgccctcccggccgctcgatcgcaaagcgtctgctgccatctggtggcggcgcccgggcatctgcggagcggggaagcctggccaggctggtgctcagacccccacccagcgcccccgcgcccccgcgcccgcgccgctctcccgggaagtccccaacagcctctggctttgctcggcttctcccagcagaaaccgagccccacgtctcctgggagccagcgcgcggtggccggtgccgtgcccagggggtgacgtgcgtccctctctaactcggttttctcatctctaaaatggggttcatggaagtgcgtgccttgtggaggcttcgcaaggctcccaggttcccttagctcagaaatcaggccttacccctgaggcgcgaggctgcgggcacgaggctgcgatttggcggcagccgtatttgcacactgtcacagaattaacctcagagctggctggctgcgggtcctggagggggtgcagaaaaggggagggcgggccaggctcccaccaggagcacctgcagatcgccctgatcgtcaagagcaaggcatgacccctgcagaacgggctgtaggctcggggcgaggggggagggggaggggactgtcaccggggggggggccagaatcctctgagcctggggacaggggactgagcgaggcaggtagagccccaggcccaggcaagagctcgaagagtattagcttttgctgttgtaaaccccatggggtggtctgcaaactgcttcccatactcgctccgtcatgccctggctcggctctgacatcactggtgttggccatatcgcggattttctgtttccccctctgtaaactggggatgccaatgccagcccccactcccggatgaggtacctggtgtacagatggctcggccactctgctgaccgtgcccccgacatcattgttccccggggttttccctctaagctccaagaggttagttaattctctgccagtgtgcagagactcccacagctgcccccaaaccttgaggtctccccccatatcctcctgccttataggcaaggcctgtttcctgagccaagggaaggcgggtgtctttcctgggaaccccctccgcacgatcacagactagagagtccaaaccacagatcatgttttctttccaaaaataggagccccactgaggcagaaacttcattcttttaataagatgatggtatgtttaaggaaaataaatatttcttttaaaaaagaaaaggcgatttggatccactcacatgccaagcactgtcccggagacccaggcttggtgcatggctgcggaggattccagcaggcatgcaactttaattacttctcagtgtaccacagaggtggcctgcagcaccgggtgtgacagcaaggtatgccaccagtaagggggatgtctcagcagctgccagcactctgcctgtgaaaacgccagctccaattcaaaggtatcaaatatttgcctagctgttcaacatttcttcaaataatatactcacgactaattcatatctggactcgacgtcttcatctctccaggcctccctcctggattagcgtgtcttgtctattccgggagaaagttgtcctacattctaaaaatagagctgggagtctggacatgggcatgcacagtcaggggaggctttatttatttatcttaagggttgtcctctgaagacagctgcagctgagcctgggactcactcatcaaatagccattcgcggctgggcgcagtggctcatgcctaaaatcccaacactttgggagaccgaggtgggtggattacctgaggtcaggagttccagaccagcctgggcaacatggtgaaaccccatctctactaaaaatacaataattagccgggcgtggtggtgggcgcctgtaatcccagatactcaggagactgaggcaggggaattgcttgaacccagggggcagaggttgcagtgagccgagattgcaccactaaactccagcctgggtgaaacagtgagactatctcaaaaacaacaacaacaaaacaaaaacaaacaaataaaaaaacaacaacagaaaacaaacagccattcataggtactcagcagagggcagggccttctaagaagtctgtgctggctgctgccttccaaaagaggccgtgctccactccaggggatgctccgtgacctctgaagtgaggacaccctctcaaatcagaggcacgggcctctctcctccatagaggggttcttccgttcctggggattaaaagccccaaatgcccctgtatcatccaggacccattgggtggattgctcaatctggccatccaggcggagttttataaataactgtttgcatgggggacctcaggaggaggagtggtaccctgggtctagtagcagtgggctgttcccatccctggggccgcagggctacgtgaggaggcgttctctgacgcagggcaaggtggctgtgtaggcagcactccctgatagcagtggtgaccgaagaaggaggaggagctcagggaacccccactctaggtgctctcctctgccccccagtttcctgctagggcctcccaggtccacctgcccagaaggcagagcgaggcatccacagatagagtctgtggaggggtacacagagccagtggaggagggtgaagggggtgtgcagggcagaggggagactaccagctcctctctcttttttgaacccgctccacctctccagcctccttctgtgtctcctgtgctaagtaccatttctctttctttctcatgtttcatcacctccgtctctcattgactctcctctctgttttcctcttgatatatcctccccacttctctgctgcagaagaggcgaggtgagtaccattcacctctcccaagtggtccagtggcagtggggcccccacgcactctacaccgttgttgtgttgctagaggaaggagagcagctgagccctggggacctggggacgggcttcatttgattctctgctcttcctcctctgaactactctaagtgaagccaatcaggattactttcatttcatcacttcaaggacttcctcctcggagtcttttcatccttctcctgccttggcctagaattagggagggggagttagtcccctcctctcttcagcccctctggccagcatcaagcccttattgagagctccaactgtgcacccagcgtcagaaatgatttggggtgcctgtgtccggagcatacagtcctgacatgggtggggacccatgatccattcattcagtcatcggacagaatgcatccagggccaccctgcttgggctccgggctagactttttttttttttttttttttgagatggagtcttgctctgtcacccaggctggagtacagtggtgtgatttcactgcaacctctacctcccagattcaagcaaccgatcctactacctcaggctctggagtagtagggactacaggcatgggccacgagcaccatccctggctaatttttttttttttttttttttagtagagatgtggtttcaccacattggccagggtagtctcaaactcctgacctcaagtgatgcagccaccttggtctcccaaagtgctgggattacaggtgtgagccactgggcccagctttttttttttttttttgagacagccttgctctgtcacccaggttggagtacagtggcactatcatggctcactgcagcctctaacttctggactcaaaagatcctcctacctcagcctcctaaatagctaggattataggcatgcaccaccacacccactaattgttttttttttccttttaatttttgttgttgttttgttttttgtttttaggcagagtcttgctctgccacccaggctgaagtgcagtggcatgatctcaggtcactgcaacctctgcctcccgggttcaagtgattcttgtgcctcagcctctcaagtagctgggattagatttcgcaccaccatgcctggctcatttttgtacttttagtggagatggggttttcccatgctggccatgctagtctcaaacttctggcttcaaacgatccgttggcctcagcctcccaaagtgctgggattacaggtgtgagccaccgtgcccagccaatctctggccctgatagagcagatagggaaggtgtgtagcacagtggatcagtagataagcccatccaagcctcagtctcctcttctcttaaatggggatgagaatccctactcacaggtttgtgtgaaggtaatatgacctcacagagggttgctttcttattaagtggcagggacttctgctctgcccctgaagcccccaaatacacataaaaggtgtaacctcagatgcaagtaaggaggcaccaccaagagggtagaggatacagacctgaaacacaaggaggagattggcacctcagctggaacagatgggcttgagcccccgaattctgctcgggttttaaattgaataaaataatccccagaatgaatatcccctctgtgaagcacgtccactgtgaggaaacccctagtaacagatctcaccatggcacaaagaaaatcctgctctcatagtcttggatgatatatacagccagctaatgcaaaaaaaatttcatgttatttttgcttatttttaagtccactgggtgcatcgtggctgatcgctgttctgacatttttcttccctcattaagaaagatgcccctggtgagatacctgtgctgggctcagagcagaaaataaatatcgctggcatccactttcctatactctctgggtgtaattaagaaaaaggcacctgcaggagagagaaagtgcagggtagaaaatggcccagtggttactgctcatgagaactccccagtcttcataaccatccaaatgtcactccttccatgacattcttcttcttcttcttctttttttttttcctgagagagggtctcgctgtgtcgcccaggctgcagtgcagtggtgtgatcatagtgagctatgatcagcctcgagtgagcccgagggagcagcctcgacctcctgggctctaatgatcctcccgcctcagcctcccgagtagcagggaccacaggcgtatgccaccacgccagtctacatatatatatttattttttgtagagataccgtctcactgttgcccaggctggtctggaactcctgggctcaagcaatccttccgcctcagcttcccagagtcctggaattacaggctggagctgctatgccggacccattacaacctcctggatctgccggggtccccctccatctctgagccctaacacttccctttggggacttttcctttccattgcggttttgcttttcccccttcacacgtctcttatcccagctgtagttggctgtcttgtttgttttgtccaagtcaccctgcttttctttggaggacccatccatgactcacagtccatgtgatttaggtagagctccagcagggagtggcactacccaggaatggccaaccaatgagggcacagaagtgcagctgcaggccactgtgattggttcaggggtgggcagtgagctaagctgaaccaatcagaacgaatcccaagatatggcggggaagtgctgaacaagcccctctccttgagctgaggctgggactgaagttgtagtcgcctttggcgccactggggagagcctgcctgtgaaagaattccactccgaggacagctgagcctctcatgacaatctgggtcctgatgccgctgtttgagcccctgggtgcagggctgctggaaacttccggaaggagattgctcttctctctgggagacgtccccggggaagcttcagaccctgccatctcgtccatccccaccatgcccaccaccgctctggctgaggcagctccctgcggagtcctgctccgggctcagtctcccagagaggcagagtcgggcaccgtgggcatgggagacctgcagcctgcctggttctcagctctcaggggctggccagggtcacagttactgtagcccagggggattctgtgagagacagatgggctaatttggctcgttcgtcatttttaatgccctaatttcctgttttacacgcagaaatggcccataaatggcacagcaggcttcagggagctgaacttgtacttcccgctgggactgacttactcctactttttggaatcaggtgcacctgcagccgttcaggagctggctggccgactgtcccagtacctccttggtcaccttcatacggagctttggtccttcaactttggaaagggttttgattaccgaatgccaggctctctttcagtcggattttcctttgccccactttatttcattttgcttttttttttttaaattattttctgggctaggagccggggctcatgcctgtaatgctagcactttgggacaccaaagcgggtggatcatgaggttcggagttcaagactagcccggccagcacggtgaaacctcatctctactaaaaatacaaaaatattagctgggtttggtggtacacccctgtagtcccagctactcaggaggctgaggcatgagaatcacttgaacctggggggtggaggttacagcgagccgagatcacgacactgcactgggtgacagatgagactctgtctcaaaaaaaaaattattttccgtagagatgggggtctttctatgttgtccaggctggtcttgaaatgctgggctcaagcaatcctcccaccttggcttcccaaagcactgagatgacaggcatgagctactgtgcccagcccatttgccccactttgcacactttctcctctcttgtcacctttccttccattaccttcaaatgtgctcatcaaaccgtgagcccctatgaggcactgggcgtgcacaccctgagcagaggcctccctgatgctccacgcccatgtagctttagtttctgctgttcctctctcctagggtgtcttgttccttccctgcataacccttatcatggtctgccattgctgagcattttgttatggttgtttattgggttcactgctgttacactgtcagttctcagaagacagaaactgatttctttttctccttaagaacgtttgcatccagctcagagactggcccacggagggccctagagaaacacccagggcgtgaccgagtgggtgggtgtgagtgtgccgcaccctggccctggtgctggaggggaaccaagcagaacctgccccaacactgctcccaggaggctcagcttctagaggggtagcggtgggagaggggttggtggggtgtggtgagctgtcctaagtgcaagtgcagatcagagtctgagctgcagctgggagagggagacaggaagcctgcccagcagcggggagcctggggtggactctttttttttttttttttttttgtcagagacagggtctcacactgtcaccgagggtggagtgctgtggtgtaatctcagctcactgcagcctcgacctcccgaactcaagagatccttccatctcagcctcccaagtacctgggaatacaagtgcatgccaccacactcggctaattttttgttgttgttattttttgtagagacagggtctcactatattgcacaggctcgtcttgaactcctgggctcatcaaggaatcctcctgccttgactgcccataacgctgagattacaggcatgagccaccttgccccgccttgggtggactcttgactgaaacacagaactttaagagaaatgcagaaataagagaatgggggctgccatccaatgcttgatcatattcgtctcctgctttgctttctgatcctgacttcccatggaggaattcagccttaggagcagaaatgggctgtggtttctaatctgccccacatcattcagcacagggctgggctgcgtggcctgtgactaatcagcgctcacccataagaaatggtgtgcatctgcaaatgtcgtggtgtcccttgcaatgccctatttcaggtctgcagtgggtgagggatgggcagggaagcacagtgaattatgtgacaccagcctggaatggcttcatccaacaaagggctgacattttctcttggtttattttgagatggagtctcaaaaatctgattacagatcacgcctgtaatctcaacactttgggaagtcaaggcaggaggattccttgatgagcccaggagttcgagaccagcctctgcaacatagtgagaccctgtctccacagttgcccaggctggagggcagtggcgcgatctcggctcactgaaacctccgcctcttgggttcaagcgattctcctgcctcagcctcccgagtagctgggattacaggcatgcaccaccatgcctggctaatttttgtatttttagtagagacagggtttcaccatatctggtctcgaacttctgacctcaagtgatccccccagctgggcctctcaaaatgctgggattacagacatgagccaccggcccggccaggagtgacatgttcattccaagagcccatctctgttcctgtattatttacaacggacgctggcctttcggacccccaaacatgtaagtggttctagctcgaggagaggtgtgaggcatgtgctatgggttcaagtcccagctctaccactgagtagtgaaaggcctggggaagctccttaacctctcacaggcttacttcctgcccctgagaagtgggagcagtgggtagccccaggcgagggtgggggttggggcaatgcctggcccataatgaagcaccctctgccgagcctctgcgtggctgccccgaagcctgggtgcaaggcccctctgtcacctctggagtacttgcctccatcaaagaagggagcagctgcctcctgccggtgttagccaggcataggctctctgccctccctgcctgggctttgtgtattcttggtgttcaaaaggtatctcttgaatgatgtgtgaacaactggtagaaactcatcagcacttatggaaatagcacaccaagttgtcaactgcccgtaaaccctttgccatccctccggtggcagcatgttccccgctggtggggagaaagggccttgcttggtctcatggaccagccaggcaggcaaggaggccgcaaacacaggactaatagcaccctcgtggcctgcccccagccctcatttcagaacgtggcccttcctgaagccgctttagctggctgggggaggggtggggttggaggggtggagacggtagcggttctccaccttccctctgccccgctgtgccgcccagcagatggggagttagcacgtcacaggtgcagctccactttggtcacctggaggctctgcttgcaaatgtggggctggtgcttggaattcaagatgcccaataaaggatccatccacagcggctgcccacgggagccatctctctgtggctcccaggagccaggagggcctggagctggggacagggggaagttctgattttaaattggggaattctgacatcagcccagtctcgttccccagaaagaaactggtcccgtctgccgtctttccagatagttccttctggagcagaagtagtccaaattccaaacctctgattactgacatttgcggttagttttttggtattatttttatacaggaaaacttgttctgaataatgcaactttacacagacactctcaccactgggcctcaccaagtcctgattttcaaaacactcagagcccttcctgagctcacctgagagatgctgtctttggagtttgttcctgatgagttttagagagcttttctttttctttgtttctttgtttctttctctgtttctttctttttttatttttggttttgttttttgagatagggtctttctctgtcacccaggctgcagtgcagtggtatgatctccgttcactgcaacctcggtctcctggcttctagtgattctcctgcctgaacctcccaagtaacaggaattacaggtgtgcactaccatgcccagcaaattttttttttttttttttttgagacagagtcttgctctgtcacccaggctggagtacagtggcacgatcttggctcactgcaagctccgcctcccaggttcacgccattctcctgcctcagcctcctgagtagctgggactacgggcgcccgccaccgtgctcggctaattttttgtatttctttaatagaggcagggtttcaccgtgttagccacgacggtctcgatctcctgacctcgtgatccacccgccttggcctcccaaagtgctgggattacaggcgtgagccaccgcacccagcctccagctaatttttatatctactaaaagtagagatgggttttcaccatgttggccaggttggtctcgaactcctgacctcaagtgatccacctgccttggcctcccaaagtgctgggattacaggtgtaagccactgcacccttcttttctttcttttctttctttccttctctccctccctccccttcctccttctctccctctcacctttccttccttcttccttcttcctttcctttcctttcctctccttctccttccccttccccttcccattctcattcccttccttctctctctttctttcttttcttctttcctaaagcaggggttacacaaattaaggtgaaccgaatacatctatatttagcaagtgaatgctttaacttcaacacacatagatacttcctagaaaccctccccaacacagcgacaacaggctgcattgggggctcatcaggaatgagtggcctgggcagaatggccctccaacccctcgcactgccctgcccataaccggccctgcccttgagggcttttgggaaaaggtaggaggggcagaaataaccttgactttcagccaaggcagaagagccagaggatggctgctgctcctggcctgcgcactgcggctcctggaagccaagacgggcaggcttgtgtggccgcggtgagcaaggagggcagccatcccatgcagatgtgtgggaggggcggggaggcagccaggagtagctgtgtcaggcaggccaggccaaggtcctggactggcctccttgaaaagcagcccctcatccctgatagcccagggttgcggggagccattgggggatggtctgagatgatgtctccggaccccgtgcaggagttttgttacgacaaatctagtcccttctcagctcctatggtgacaagaagctccagctattttattttgttttgtttactttagagatgggattttgctgtgttgcccaggctggagtgcagtggccccatctcagctcactgcagcctcaaattcctgggctcaagcgatcctcccacctcagcctcctgagtacctgggactacaggcatgtgccacaacgccttgctaatattttgatttttaaaaaatttatttttatgtatttattttttgtgtggagatctggaattcttgggctcacacgatcctccttcctcggcctcccaaagcactgggatttcaggcatgagccccacagtccagccagctccagcttttatttactttttatttttttgagacaaagagtctcgctctgtcacccaggctggagtgcagtggtgtgatctcagctcacgcaacctccacctcctgggttcaagcgcttctcatgcctcagcctccagaatatctgggactacaggtgtgtaccactacacctggctaatttttgtattttttgtagagacagggtttcgccaggttggctgggctggtctcaaactcctggccccaagtgatcccccactttggcctcccaaagtgttgggattacaggcgtgagccaccgcacctggcccagctctaacttttaaacctgctcactggctggctctcttctcgacttcttgggacctgagttgtccttcatctctgtgacctacctgacaggtgtttctggggtccagcctgaagcacctggctggtgagatcagagtccaattctcaccctcttcccaggaccccctcccagctcctgagcctgtcaaccctggctatgcacagccctcgcctgagaagcgtcttcaaaattctagtgccttctcctcccttcaattccaggataatggcacacacagcaccagtcaggccctggcctgtgttgcaggcacacctccgatacattttgacctgcatgccaactgcagaacctaaacccaggcaggggtcactccccagcagggtgctgaggttcaaagagctcgaaggaaatacctgcctgggaagacaggtgacaggtgactgagttcctctccagaactttccagacaataatcaggctgtgtgtcaaattcaccaagatttagctccagacccagctgatctgcagccaggatgctattgggagcatcactgcttccgtctttgacccatctttccacgtggccccccagacagagagcacttccaacctatgcataaaaatacaggggaaaggccaggtgcagtggctcatgcctgtaatcccagtactttgggagaccgaggccattggatcacttgaggtcaggagttcgagaccagcctggccaacgtggcgaaaccccgcctctactaaaaatataaaagttagctgggcatggtggtgggcacctgtaatcccaactactcaggaagccaaggcaggagaatcacttgaacccaggaggtggaggctgcagtgagccaagatcatgccagttatacaacagcctgggtctgtctcaaaaaaaaaaaaaaaaaaaaaaagggagcagagcgggggaagaaaaaaaaaaaaacccagagagcactgttatttaccctgatgcctcattttcaagcatgcattgtgaatagagctgaccacagtagcacaggtctcaccgtaggcctccaggaacaccctgcaacctcagtctgcccctccacattcatttccaggaaactggagttgatcgttaattctcagacatcctttggtgcagactggaggatatcaatgaacatgaacacatgcgagagttcctgtacggagctgtggaccataaaccacgcatgctgtcccggtggcaagtcagggggctttctgggtagttctgctttctctccctgtatggagagttccacagtgactctggggcaggcagggttgagggccccttatcagtcacctggtccctcctctccttcccaatgtcacccccattctgctgacctcaatccctgctctccagctacagatacatttccttgatcttcaccttgaagcctgggcccttgctcttctctattcctggcacatcctcctcacagatctttacatagcaggttgattctcaccctttaagtcttgctcaaggtcacctcctctgagaaaccctccctgaccacccaggctaaaggaatccccgccacccctcccctcccacccgccccccgccgcacaaaatgcttcccacacctgccacatctgggtcagtctcctgtctgtagagtgcaagttcacagctctagttacagcagctacaactgtgtctggagctggggtactaccccatttaaccatctgttgattaatgcacttgattaacatcagaggacgtaaggtcctcgtaaagctaagaaagaatttaggagaatgactagggctggccacattagcaatggacccacagtaggaggcttcagggacaccctgcctgtgtccctccagtgttcactgctcccttgcatgagacccagaaaggggctggcactctgcttggggaaaggctctgcctccaggagactgctctgttgtgtgcagaacaagggggaagtgccagaaattaatggcccagggaacagccttcagcaatgatgaagagaagttggataagtagcccagctctcatgtctacgggatgggtcaaggctgagtctgcactgcctcccagaggccccagtagaggggctgcctgcagcagtatctgctcagtcatacacccctacacgtgtacactaggaaggaagtgctggcttccttcccttccctgctgcacacaacactccctgaaacatgcctgcaagaaccaccccttggctcagcagctttgcagtgatgaatccaacctctgcagaaaaggcaccctggtgttctaattcctgggcatggacaaactgccccgaggaggatgagaggtgtctccttcacctctgatgttgggtctcaggttcctgggtaaagggactcctttggtttcctggctcctgccccacagacaaattaaactggacaaggtgacaaaaggagtcatttggaaaagtcttgggacagggcttagtggctcatgactgtaatcccagcactttgggaagttgaagccaggagtttgagaacaccctgggcaacacagtgagactccatctccacaaaattttttcagacttagcagagtgaggtgacatgtgtctgtagcttcttgagaggccaagtcaggaggatcacttgagcctgagttcaaggctgcagtaagctatgatcgcaccactgcactttagcctgggcaacagagcaagaccctgtctctaaaaaaaaaaaaaagaaaaagaaaaagaaaagtcaggccgggtgcggtggctcacacctgtaatcccagtactttgggaggccaaggcaggtggatcacctgaggtcaggagtttgagatcagcctggccaacatggcaagaccccatctctactaaaaaatacaaaaattagctggtcttggtggtaggcacctgtaatcccagctactcaagaggctgaggcaggagaattgcttgaactctggaggcggaggttgcagtgagccaagatcacaccattgcactccagcctgggcgacaagagttaaactctgtttcaccaaaaaaaaaaaaaagaaggaaagtcaaagtcttgtggctaaagacggcaggtggaatgaggagtgggagagaagggcggggaaaggaggtgagatgcctggagaagttgaggtccagggaaccaactccacccagagcaagctctctgcaggcaggactcaagcaacagccgcagatgggagcaaaaaaagttttgctactcctccctcccagagatatttctaagagctccattttctttccagttggctaagaagcaaaaaaggaacaatagattcaagctgaaataatttgcatttatgatgaacacaaggaatatctaccttgcattttcctaaaaaagaaaaattaaaccccatttttaattaactgataaactattaatcaaatttttgcaatgttaggtgacacattattcatttagatagaatgactgtgaacttaaactaatcaaatctgatttgcccacataggcttgattgaaatacattttaactagcatatacaaagagaaaatcttggatttcttacctaatcttcagagtatactgctgagttaataagggcagttttttttttaaatgagaccaccatttcttcatctgcatatcaaaatcaagaggaacttaattgcaaaacacatattcctgaaatctaatcattacactgctttagggtattttattgaagcatgttaaattatggacagaatattaatgatgaaactaatcaaacccaattagtcacttctaacaatagtcacataaatatacaagtcaggtactaaagtactgtagatatgatgtaaaaatggttaaaatcttaaatgtatggaatatttatgaaatattcatgttgaatttaaagccaaaaattattggggtaagtcactttaaagaaaataaattaggcagtgtcctatactgtttgaccggaattcacaagttcacattttcttcaggtatctttgaatctaggagattagtgagtctataatcaatcaatcagcaaaattttaataagatgacttaccatattcatgacctagtatttcattcttgcatccagagacttttttttggatttttgttttctgactttttcaaggccttttggaaaggggtctccaggccttggaaaagcagatggagtggtggatgatttctggggttggggatttgccatccacactgtctccttccctgcctccagccccaggtgcagaacttgctctaggggcaaaagcagtgaggacagaacagaggagtcactgcccagggggcctcctcctcctcctctcatacctgaggctgcagaggaagctgaagggcccaggggagctcctggccttggcctgtgaggattcttggtggaagattccaggctggggagccaggccaaagcagacaggcagtactgggtctggggttccccaggcagagacctccctctgcttcagttcaagccagtcccttctggctacctgggcccagactccagcatccacacatatacagccagcagtttcatcacgtggtagctacagctgccttcttaatcaaggaggttgtcaagcctcaccatttgcttttctggcccttaccctgttctgctgtccactcctgatcccccatttcctccctccagacttctttccaggatgctgcattcctaccacgtgtgctgggaatctcagctcctggagaaagccggtcagcggctctgggccctgctctggccagacatctcaagtggagcaccacaggaaataggaaacattgttcattcattcatccatccacccatctatcccatccacccacccatccacccatccatgcatccattcacccatccatccatccatgtacccattcatgcacacatctatccatccatctacccatgaatctatcccatccatccacccacacatccatctacccattcatccacccatctatccatccatctactcatgaatctatcccatccacccacccatgcatccatctacgcatccttctgcccatctatccatccatctactcatgaatctatcccatccatccacccatgcatctgtgtacccattcaggcatccatctatccatccacctacccatgcatctatcccatccacccacccatccatgcatctagtcatccatccttccatccgtccatccatccatccatccatcaatccacatacccattaatccacccgtctatccatctacccatgcatttatcccatccatccacccatgcatccatctacccttccatccacccatctatccatccatctatcccacccacccacccatccatccatgcatccatgcatccatgcatccatgcatccttccatccatccatccacatacccattcatccacccatctatccatccatctaccaatgcatctatcccatccatccacccatgcatccatctaccaatccatccacccatctattcatccatctatcccacccacccatccatgcatctattcacccatccatccatccatgtacccattcatccacccatctatccatccatctaccaatgcatctatcccatccatccacccatgcatccatctaccaatccatccacccatctattcatccatctatcccacccacccatccatgcatctattcacccatccatccatccatgtactcattcatccacccatctatccatccatctacctacgaatctatccatctatccacccattcatccacccatctatccatgggtaggtagatactcatgcatctatcccacccacccacccacccacccatccatgcatgcatgcatccatccatccatgcatcaacccacccttccatctatccatccatccatccatccatccatccatccatccatccatgcatcccataaacatttaccaaagacaaatatgtcccgggcccagtgctggactctccccaagcctggggagcatattaaagaagtagactttgtgttgctttttcccgcatggcatgcatgctcctgcttcagagaaagacatctgtattgtcccttgaaggacccctctgccccacttttattccctaaggtctagggggctgctccatcccctcaatccactggccatgtgatccaggcctgccctagtccctgagatgggctcacaggtgggtacatgaccagggtgtcatcctggcacttttgctggaactaaaagaggagataagccctttgctgcttggggtctcttgggggagaggttgggaccatgacatggagatggcctgcctgagactgaagccgacagaggagaggaggccaagtccttatgacatcgactgggctcccggagcccactctgcctggaagtttccacttacctgagccaataatattttttcctttagccaggttgaattgtattttctgtcacttacaaccaaaggagtcttggctcatagagaagataaacaggaaagacactatccaatgccacttcctccatgaagtcttccctgattcttgccagctccattggatattttcctgcttagaagcctggcgggggaggagggattgttcttatggatctctcatgaccttagctttttatgccttggagtataaaggggaaatctgggtgcaaagcctgtatatgcatttgagtggggacaaagcagcagaaagaaagatacagagttaagcacaagatcttagcggaagatgaaaacctcagccaaatataagtgggggactctgcagtgaggcaagtggacacctcagaggacatgggagtgagagtggtgttgaaatcacccagttctaagctacagggagagggtagtgctcttggccttggtgcatatctgtgacccaggtcccctatccaaccatgagcctccaacgcaggcaagaagccggcctcttccttccagcctcctggcaccatcaggaagggttgcttggcaggccacctccggactttgatgcagaatgtccccaggttctataagcctccaccctcgagttcccaaaggctctacttgagatgttgccttgggtcaatgtgtggcctaggttcctggtccattggtgcatttccatagcaggttaagctggaccttggtaaagtgtcacatgtacttttttttttttttgagacagtctcgctctgtgtcccaggctgaagtacggtggtgtgatctcagctcactgcagcctccacctcccaggttcaagcgattctcctgcctcagcctcccgagtacctgggtttacaggcacccaccaccatactagctaatttttgtatttttaatagagatggggtttcaccacgttggccagattggtcttgagctcctgacctcaggtgatccaccagcctcagcctgccaaaatcctgggattaaaggcatgagcctccacggccagccttgaggccattttaaattcatcctatcatcacatgattctgatcttcttccctcccaagactgggtttcttgtaggaggcatggctgctgtgggtttcaggtaagcaacttagcctcagtgtctttatctgtgaaatggacatcatgatggctaacccatggcatttagacaatgcaagccagcttttttttagccttgtagggtccagacccgatgggtgaaccatagtctgtctctttgcaagcagtcaggcctggacctgtgctctcatttttgtcaagaagaagagagtctgtactgatgaaaccagaatctatttcaagtcaagcagaacttctccggaagctggggtagcatcccatgtccccacaatttgctgcagggggagctggggcaccccaaggaaggtccacttttccctgccaggaagctgaggaggcagtgggggcataggtgcttccttcatctctccattttgtgtggctgcagaatttgtgcacagccctggtggcatcatagttactcctgccacccacctggcaggcctccattgcttctaaatgcggtccaggcctctttctgccctctccctcccagggcctggacagacccatggaggggaggcgggtcccagggtcagggcaggctgataccttggaaagaaagcattgtgtcatcagagacacacatgggaggatgatttatttctgctctggactgccacagcggtctggccttatctctgttttgcaaggccccccggcccacgtgctcaaccactctgcttcactctagaaagaagagaaccatttagatgactgactgaattttcctggaaatctggccctccatagatcttcctggaaacatctggagcttatttgtaagctgttgaggcaccatcaaatcccacatcacaaagagatgcacccgttttaaatgaacttagagaagatttggcgaatccatactccagtctacttaggctttaaaccgtcttttattttttctcactctgtcacccaggctgaagtgcagtggcactatctaggctcactgcaagctccgcctcctgggttcaagccatcctagtgcctcagcctcccagagtagctgtgactacaggtgtgcaccatcacgcccggctgatttttgtatttttagtagaggtggggtttcaccatgttggccagcctggtctcaaactcctgacctcaagtgatctgcccgcctcagcctcccaaagtgctgggattgcaggcgcgagccaccgtactcagccagaaataggttttaaaccttccaaactacttaattttggaggattttgattctattgattgaaaacataaaaatgcaactcttctcattcaaggagcacaaaccccgactgtcatcagggaagattggcatctgctggccggatcgtcacagaattcttggtccatttgtatggctggtgggaggcgtggtcactgggaggggagcaccatgacccagcggtgcccgggctctgtgggagacacatgtctccctgaagtgcctgtttagttatcaagccattaaaccaagtatcaaaataaaatgaactcagaaccaggctttcaaattgctgcatcacgaagtgttaatcaagattttcaaaaataatgaagcacatttaatcacattgccattcactaagagtatcataattaatatttgggtgagagtaaaaagattgtgttgttaataaataagttattttaaatattgtttatctttagcttatccttaaaacatctagtcagtgtatgttttattataaacatagtaaaatagtaccatagtacatgcgtattggtggcacgtctttgggatctcctaaaagcacacctgagttaaggaatgggtgcaggtagtttatttgggagttgatttcaggaagcatgagggagggagtaggggatgagggagggagtagggaatgagggagggagtagggaatgagggagggagtagggaatgagacagggggccaggcacggtggctcatgcctgtaatcccagaactttgggaggctgaggcgggcagatcgcttgaggccaggagttcgagactagcctggccaatatgacaaaaccccatctgtactaaaaatacaaaaattagccgggtgtggtggtatgcacctgtaatcccagctactctggaggctgaagcagaagaatcactggaacccaggaggcagaggttgtcgtgaactgagatcatgcaactgcactccagcccctgagtgagagagtgagactctgtctcaaaaaaaaagacagggagggtgcattcaggacaggctcaccccgctccacggggccttctgagagatcaggtagaatgcattcaaattgtcccattgaggaatgaggaagctgggatatcttccccctatttctgtcctttcttggtggagagttgcccttaggataactccccagtactttcaggctgccctccatgctgactagcaagcaaaaatcatttagcttaaaaatcagaggggacacggtgaaaccccgtctctactaaaaaaaaaatacaaaaaattagccgggcgtagtggcgggcgcctgtagtcccagctactcgggaggctgaggcaggagaatggcgtgaacccgggaggcggagcttgcagtgagccgagatcgcgccactgcactccagcctgggcgacagagcgagactccgtctcaaaaaaaaaaaaaaaaaaaaaatcagaggggaggccaggcacggtggctcacacctgtaatcccagcacttcgggaggccaagtcaggcagatcactgggggtcaggagttcgagaccagcctggccaacacagcaaaaccctgtctctactgaaaaaaaaaaaaagccaggagtggtggtccacacctgtagtctcagctacttgggagactgaggtgagagaatcacttgaacacagtaggcagaggtggcagtgagccaagatcatgccactgcactccagcctgcatgacagagtgagactgtgcccctcaccccgcacccccccaccacctaccgaaaaaaaaagcagagaggagaaaaagctagtggtgggaggcttgcatgggcagtgtctaccacagctacgggtgaacccagaggtgggctgaggagctgcagggtgggccagtgacaggatctgctgaaagatctgtgcttgtggccaggtgtggtggctcacgcctataatcccagcactttgggaggctgaggcgggtggatcacgtgaggtcaggagttcaagaccagcctgccaacatggtgaaaccctgtctctacaaaaatacaaaagttagctgggcatgatggggggatgcctgtattcccagctactcgggaggatgaggcaggagaattgcttgaacctgggaggtgaatgttgcagtggcgcatgtcgccattgcactccagcctgagcgacagagagagactccatctcaaaaaaaaaaaaaaaaaaaaaaaaaaaaaaaaaagagagagatctgtgcttgtaaacatttggctgaaaagggtgaataaccaaacactaggtaaggctggcacagtggctcacacctgtaatcccagcactttgggaagctgaggtgggaagagtgttttagaacaggagttcaagatcagcctgggcaatgtagtaagactgtttctatgacaattttgttttaaataaaataaaaattagcagggcatgtggtgcacacctgtattcccaggtatttgggaagctcagcggtaggattccttgagcccaggagttcaaggcagcagtgagctatgattgtgccgccgcactccagcctgggtgacagagcaaaatcttatctccaaaacaaaacgacaaaacaaaactgaatggagactactcatcttgagatttttatgaagtggcaatgaactggtgatggggagtaagtgctatttgaatccaatctccacccttgttattaacaacgaaagctcaccagcgtgcccccaccccccaccatccaccccttgtcccttggcacccagcccaggttatttcactggtaaaatctgtcaaatcctaaaggacaagaaaataattgtgccgctttgactgtcccagagcataggaaaagacctgctatgtccctaaatgaagacttactgttggaatgatgtgcattccccttggattagtctacaaatttagtgtaattccaatcaaagcaaagggaaactcattctgtcaaaatttttatgcctttcttttaagagctcctgaaaggcacccctcgatgcctttgaattttatttttttaatcaagttaattgaggtataatttccatacaaaaaaaagtgcatccatttgtagtgtgcactttgatgagtttggcagacgtgtgcacccaccaaaagcaacactacgactgagacacagaacatttccaacacccccaaaagtttctttatgctttcttcagtcccctccccaacacctggccacagggaccactgacctccttcctgttactagagattagtttgcattttctagattttatgtaagtggaatgatgccatgtgcatttttttgtgtctggcatttttcactctgcatggttatcttggtgtttagccacgtggtctgttcacacatattaccaagtactttcctgttgtacagatataccatattttgtttgtcaattcacctgttgttttgtcatttatgttgtttccagtctttctctggctcttgtgaataaacaataaacattttaatttttatttttattttttttttttattttttttttttaaaggacatatcatatttattcatacacatgctggaattattggtgcagacatttaaatacattttctttgagaaagtccttttttttttttttttttgatggagtttccctcttgttgcccaggctggagtgcaatggtgcaatctcagctcacaacaacctctgcctcctgggttcaagcaattctcctgcctcagcctcccaagtagctgggattacaggcatgcaccaccacgcccagctaattttttttatttttagtagagacggggtttctccgtgttggtcaggctggtcttgaactcctgatctcaggtgatctgcccaccttggcctgccacagtgctgggattacagtcgtgagccaccacagctggcctgggaaagtccattcttttttttctttttttttttttttttaaatttatttttttattgataattcttgggtgtttctcacagagggggatttggcagggtcatgggacaatagtggagggaaggtcagcagataaacaagtgaacaaaggtctctggttttcctaggcagaggaccccgcggccttccgcagtgtttgtgtccctgattacttgagattagggattggtgatgactcttaacgagcatgctgccttcaagcatctgtttaacaaagcacatcttgcactgcccttaatccatttaaccctgagtggacacagcacatgtttcagagagcacagggttgggggtaaggtcacagatcaacaggatcccaaggcagaggaatttttcttagtgcagaacaaaatgaaaagtctcccatgtctacttctttctacacagacacggcaaccatccgatttctcaatcttttccccacctttcccgcctttctattccacaatgccgccattgtcatcctggcccgttctcaatgagctgttgggcacacctcccagacggggtggtggccgggcagaggggctcctcacttcccagtaggggcggccgggcagaggcgcccctcacctcccggacggggcggctggccgggcaggggggctgacccccccccacctccctcccggacggggcggctggccgggcggggggctgaccccccaacctccctcccggacggggcggctggccgggcggggggctgacccccccacctccctcccggacggggcggctggccgggcagaggggctcctcacttcccagtaggggcggccaggcagaggcgcccctcacctcccggacggggcggctggccgggcaggggggccgaccccccccacctccctcccggacggggcggctggccgggcggggggccgacccccccacctccctcccggacggggcggctggccgggcagaggggctcctcacttcccagtaggggcggccgggcagaggcgcccctcacctcccagacggggcggctggccgggcggagggctgagccccccatctccctcccggacggggtggctggccgggctgaggggctcctcacttcccagtaggggcggccgggcagaggcgcccctcacctcccggacggggcggctggccgggcggggggctgacccccccacctccctcccggatggcacggctggccgggcgggggggctgaccccccacctccctcccggacagggcggctggctgggcgggggggctgaccccccccacctccctcccggacggggcggctggccgggcggggggctgacccccccacctccctcccggacggggcggctggccgggcagaggggctcctcacttcccagtaggggcggccgggcagaggcgcccctcacctcccggacggggcggctggccgggcaggggggccgacccccccccacctccctcccggacggggcggctggccgggcggggggccgacccccccacctccctcccggacggggcggctggccgggcagaggggctcctcacttcccagtaggggcggccgggcagaggcgcccctcacctcccagacggggcggctggccgggcggagggctgacccccccacctccctcccggacagggcggctggccgggcggggggctgacccccctacctccctcccggacggggcggctggccgggtggggggactgacccccccatctccctcccggacggggtggctggccgggctgaggggctcctcacttcccagtaggggcggccgggcagaggcgcccctcaccgcccggacggggcggctggccgggcggggggccgaccccctcacctccctcccggacggggcgactggccgggcagaggggctcctcacttcccagtaggggcggccgggcagaggcgcccctcacctcccggacggggcggctggccgggcaggggggcagacccccccccacctccctcccggacggggcggctggccgggcggggggccgacccccccacctccctcccggacggggcggctggccgggcggggggccaacccccccacctccctcccggacagggcggctggccgggcggggggccgacccccccacctccctcccggacggggtggctggccgggctgaggggctcctcacttcccagtaggggcggccgggcagaggcgcccctcaccgcccggacggggcggctggccgggcggggggccgaccccctcacctccctcccggacggggcggctggccgggcagaggggctcctcacttcccagtaggggcggccgggcagaggcgcccctcacctcccagacggggcggctggccgggcggagggctgacccccccacctccctcccggacagggcggctggccgggcggggggctgacccccctacctccctcccggacggggcggctggccgggtggggggactgacccccccatctccctcccggacggggcggctggccgggctgaggggctcctcacttcccagtaggggcggccgggcagaggcgcccctcacctcccggacagggcggctggctgggcgggggggctgacccccccccacctccctcccggacggggcggctggccgggcggggggctgacccccccacctccctcccggacggggtggctggccgggcgggggggctgaccccccacctccctcccggatggggcggctggccgggcggggggctgaccccccacctccctcccggatggggcggctggccgggcggggggctgacccccccccacctccctcccggacggggtggctgccgggcggagacgctcctcacttcccagatggggtggctgccgggcggagaggctccttacttctcagacggggcagctgccgggcggaggggctcctcacttctcagacggggtggttgccaggcagagggtctcctcacttctcagacggggcggccgggcagagacgctcctcacctcccagacggggtctcggccgggcagaggcgctcctcacatcccagatggggcggcggggcagaggcgctccccacatctcagacgatgggcggccgggcagagacgctcctcacttcctagatgtgatggcggctgggaagaggcgctcctcacttcctagatgggatggcggccgggcggagacgctcctcactttccagactgggcagccaggcagaggggctcctcacatcccagacgatgggcggccaggcagagacactcctcacttcccagacggggtggcagccgggcagaggctgcaatctcggcactttgggaggccaaggcaggcggctgctccttgccctcgggccccgcggggcccgtccgctcctccagccgctgcctcccgggcggcgctcgccggcgcggcggcaaagactgagacagctccgctgcccgctgaactgcatcctcccggcggtcgggcggcggcggctgcggtcggtcgcggcagcggctccgcttcatatctgcagctggggcccgcgggcgtcagcgccgcgactgtcctggctccgcactgccccgggccgcagcgcagccgcgccaaccaccagccgcggccaccatggccggacgggctccctaagccaccgaccccagcccgcggcgccttcgacccttctggggcctccggcgccgcgacctcctctgcctgaaatttcttttttcttttccttttattttattttattttttgagacggagtcttgctctgttgtctgggtggagtgcagtggtgcaatctcggctcactgcaacctctgcctcccaggttgaagcgattttttctaatttttattttttattgtttttttgagagagtctcactctctcgcccaacctggagtgcggtggtccaatctcggctcactgtaacctccgcctctcaggttcaagcaattatcctgcctcagccccccgagtagctgggattacaggcatgcaccaccttgcccagctaatttttatacttttagtagagacgggtttcgccatgttggccgggctcatctcaaccactgacatcaggtgatccacccaccttggcctctcaaaatgctaggattacaggcatgagccactgtgcccggctgaacatatttggttagtttgttcaaagcagaagaaacctcagacactgcatggttttaggctttggccctaccatcctcgtgagcttcctgtccaggaggatcatgaatgccccggttctactaagtgcggaccccaaggtccttcccacccccgagccaactgctaaattcccttactagtcctagcaattgttttgtagagtccttagagttctttatgtaaacaatcatataatttccaggggattcttcctttccaatatttatgtattatatttcatttcatattattattgtattttatttcattttactttatttttatttacttaatgtctaactgcaatggctaaaacttccaagacaatattgaataaaagtgttaggagtaagcattcgtaccttgtctccagccttgggggaaagcattcactatttcgcctttaaggatgattttattttttattttaattttattatgatttttttgagatggtgtcttgctctatcgcccaggctggagtgcagtgtcgcgatctcagctcactgcaacctctgcctccggggttcaagtgattctcctgtctcaccctccctagtagctgggattacaggcttgtgccaccatgcctggctaatttctgtatttttagtagagattgggtttcaccatgttggccaggctggtctcgaactcctgacctcaagtgatctgcctgcctcgggctcccaaattgctgggattacaggcgtgagtcactgtgctcggccaaggatgattttaactgtaggctcttcaaaggtgtccttgatcagattgaggaaattcccctctatttctattctcttctatttcagtttgctaaaaaagttctttaaatcatgaatagatgttaaaatatgtcaagtatttttctacatttattgaaatgatcattggtttttctgttatattctgttaacatggtaaatggtattgactttttttttttttgagacagggttttgctctgttgcctaggctggagtgcagtggcgtgatctctgctcactgcagcctctgcctctcaggttcaagcaattctcctgactcagcctcctaagtagctgggattacaggggtgcaccaccacatgggctaatttttggtagagatggggtttcaccatgttagccaggctggtctcgaactcctggcctcaagtgatccacccgcctcggcctcccgaagtgctggaattacaggagtgaacactgtgcctggccttacatttatttttaaatcttaaattaaatgtctttgtcagattttggtgttaggtgttgctggtttcaaagcaggggatgagaagtgtcccctcttattgtgtctgttttgcaaaagggtgtgtgagattggtgctatttcctccttgaaattataataggcttcaccagagaagccatttggaccctggagttttctctcttggaggatgtttaactaccaattcaaattcattagtagatccataggacttttcagattttgttgcattttgtcttaattttggcaagttgtagttttcaaggaatttgtccatttttctgtttgtcttgatcagtctggctggatgtttatctgttttgctgctctttccaaagaatgaaaatgaacacctgtggagcagccataagccagtgcacatccaggagcccagcccactggacctgcagcttgcagcacagccaccctgcagagcacagcctcaattagccagttcccagccaacccacggagacaggagccaggagagatagctgagttttgggggtggcttgttaagcagtaatagctgactgatacagttaatgggtatacactttatttaaccagttccctacagatggacatttagcaaagtgaattatttcgagagaagcttggctccatttaaaaaacatttctgggcttggcgcagtggctcatgcctgtaatcccagcactttcggaggccgaggggtggatcacttgaggtcaggagttcaagatcagcctggccaacatggtgaaactccatctctactaaaaatacaaaaattagctgggagtggtggtgagtgactgtaatcccagctacttgggggattgaggcaagagaatcgcttgaaaccaggaggtggaagttgcaatgagctgaaattgtaccactgcactccagcctgggcaatggagcaagactccttcttaataactaactaaataaataaatattaaaaaaaaatttctgaccaggtgcagtcactcacacctgtaatcctagcactttgggaggctgaggcaagaggattgcttgagctcaggatttcaaaaccagcctgggcaacatagcaagaccgtgtttctctctttctctctctctctctcaatatatatctctctctctttctatctctctcattttctctctctctctttctctctctctctctctctctctctatatatatatataaattccttaagatctatttctagaagaattgcagtcatggtttacatatttataattttaaaacatattcctaaattatgctcaccaaagctatgctgtttcacatttcagcaatttataagcatcaattttcctcatattttccaacattgagtgttgaaatatttaattttctgcaatctaataatgaaatgtaatatcaatttaaatttgcattcccctgagcattagaggagttgaataaacttttcatatacgcattagccatttatttttcttcttccctgaattgcccttcgtcttgtttgttctcttttgtagtgttttgtcttttcctatttgtaggagatgtttatataactggatattaatcttttgtctgctaaaagtattgtaaatattttcttgaattataagagtttctaaaaaaactttgtagcatcttttattggagaaaagtttattatatttacacagttaaatctgataattttttttaatgctattatatttgcctaagaatatttttcctattctggctgggcactgtggctcactcctgtaatcccagctctttgggaggccaaggcaggcagatcaccttaggctaggagcttgagaccagcctggccaacatggtgaaattctgcctctactaaaaataatatgaaaaattagccaggcatggtggtgtgcacctgtagttccagctactcaggaggctgaggcaggagagaattgcttgaaattgggaggcatggaggctgcagtgagccatggttgtaccactgaactccagccaggcaacagagcaagactctgtctcaatatatatatatgtttttcctattcaaaaactataaacattaatcatattttcttctgttataatactttttattgctttgggtctataaattatctgacacttattttggggttattatttttagtataagattcttttccaaaacaacaggcagttcttccaacagtgtttataatttcattacttcctctttaattcgaaatgccaaatttaaactagtttttaaataaaggttgtttctggaatttctcttctactgatccctcatggcattatatcaatattatgctgttttactgctgatttttttttctttttgagatggtgtctcactctgttgcccaggctgtagtgcaatggtgcaatctcagctcactgcaacctctgcttcccaggttcaagcgattctcctgcctcagcctccctagtagctgggactacaggtgcgcaccaccatgcccagttaatttttgtatttttagtagtgacagggtttcaccatgttggccagtctgatcttgaattcctgacctcaagtgatccacctgcctcagcctcccaaaatgctgggattacaggcatgagccaccatgcttggcctgtatggatgttttattctgatatttactcttccaaatgagcttgcgaatattaacaaattcataataaaatgtgcgtggattttgtgtgggattgtatcaaatatgtagactatttgtagagaatcatagtttgatagcattgagtcgttgcatttgatttatatcctttttttttttttttttgagacggagtcgcccaggctggagtgcagtggagctatctcggctcactacaagctccgcctcccggggtcacaccattctcctgcctcagcctcccaagtagctgggactacaggcgcccgccaccacacccggctaatttttttttttgtatttttagtagagacggggtttcaccatgttagccaggatggtcttgatttcctgacctcgtgatccacccgtctcagcctcccaaagtgctgggattacaggcgtgagccactcgtccagcctgatttatatcttgatctttagaatttcttattttaatgatcttcagtaaaaattatttggttttcttaccaaacacagcatgttctcactcataagtgggagttgaacaatgagaacacatggacatagggaggggaacatcacacaccggggcctgtcgggcagtggggggctaggggagggatagcattaggagaaatacctaatgtagatgatgggttgatgggtgcagcaaaccatcatggcacatgtatacctatgtaacaaacctgcacgttctgcacatgtatcccagaacttaatgtataatttaaaaaaattatttggttttcttcaggtaggttttgcacaattctttttttttttttttctctttttcaagagataggattttgctctgtcacccaggatggagtgcagtggcatgatcatagctcactgtaacctccaactcctgggctcacttgatcctcctacctcaacctcttgatcagctgggactaagggtgcatgccaccatgcttggctaattttttatttgaatttttttagagatgagatctcttgctatgttggtctggctagtctggaactcctgatctcaagtgatcctcctgcctcggcctcccaaagtgccgggattacaggcatgagctaccacacccggccacagttcttgctaggtttaattctagagtttgtttttgttgttctgtaatgaatctactgacatgaaaatctttttctgacatattaaggccaaaacttaggttaatagcattcatgatatattctaatttttgcaaagactgtatctacatatatggatagctgtatatgtaggaatctttagttgtaattttttttttttttgagatggagtctcactcttgttgcccaggctggagtgcaatggtgcgatctcagctcaccacaacctctgcctcccgggttcaagtgatctcctgtctcagcctcccgagtagctgggattacaggcctgcgccaccacgcctggctaatgttgtatttttagtagaaacggggtttcacagtgttggtcaggctggtctcgaactcccgacctcaggtgatcctcctgcctcggccttccaaagtgctgggattacaggataattgtttatttacttctctgtctccacttggttgatgtgttttaggaaaggaactatattttgacgacttcatgtctaacacctgcatagcacctggcacattggtagctcaaaaatcctttttacatgaatgaatgaatggaataaagggatagtgaaggacctacattgagcgatgacagtgtcttttccttcagtgcatggcatttgttgattcctttatttctgcttccttgtattttctgatttttcttttgtgatcatgtattctgttgtgatttaaagaacagaaagaaaaagatattcacttggaaaaagtagaaccataatgaaagagcaccacaaggtgtacctcatatactactagtaaatttttttctttccacttgagacagtgtctcactctgtcacccaagctggagtacagtggcaagatctcagctcaccgcaaactctgcctccagggctcaagtgatcctccccgctcagcctcctgagtagctgggaccacagacacacaccaccaaacccggctaattttttgtagttttggtagagacggggtttcgccacgttgcccagactggtcttgaactcctgagctcaagtgtaaatttttaaaatgagaaaaacaggctgggtgcggtggcttatgtttgtaatcccagcactttgggaggccaaggcaggtagatcacctaaggtcaggagttcgggaccagcctggtcaacatggtgaagcccagtttttactaaaaataccaaaaaattagccaggtgtggtggtgcatgcctgtgatcccagctactcaggaggctgaggcaggagagttgcttgaacccagaatgtggaggttgtagtgagccaagattgtgccactgcattccagcctgggcgacagagcgagactccatctcaaaaaaataaaaataaaaataaaatgagaaaaacatatgcagttcctaaaatggcttagggtgcaggccgtcacctcctgggtgattcccatttcagtggcgtggctttgtggtctgtaaatgggcttcgtcctgccttgctggtgccccttaccacccctgctgtgcagggcaagggttggcttgcctgctgctcctggctccaggccctcagcaaaggcccagcacagttcaaagggactagagggaagccagggaaagtaattctttagtctccgaggttgttttaacattatgatgatatatggcatatgttgctacaatggctgggcacatttacacggagggcagaccgggaggcccttagggctgggagggccaccaggtcaataatatatgcaaccggcaaaagaaaacatcgacctcatttcctccagagagcagacaactgtaaccctggagtcctggtttgcatgtaaataatgagcaagatactgcgtggccacttgtatcattgaggggagagtgagacaagaacaagaaagataaattagaaaaatatgagggcaccacttatggatctgtacaaggaagtgtcattcttcaggttaattttgcttcctctagaaagcagctcagtgttggtaggcttctatgtctgagattttaaaatggctttggtatgattattatcaatgaaataatcactgtcagtaacaaaaaatcagtttctcgagaggatgactgacgtgcggttgcagcatttggccccggggcccattaaatcctgaccaaagtgctgaagagttgccccacaaatgatttggctacactgggaatcacccggaaggaggccaagggtgtgtaattctggggaagtttggcggcagcctagggcctcctcaatctgaaagctcttgtttcgctttgtaaagcgtttgcttgtttctttttctttctctctttttttctttctttctttttctttcgcctgcctccctccctccttccctccctcccttccctcctctctccgtccctccttctctccctctcctgcctctctccctctctcccccctttctctttccttcctccctccctcccttacttcctccctccctcctctccctctcctgcctctctccctctctcccccctttctctttccttcctccctccctcccttacttcctccctccctcctctccctctcctgcctctctccctctctcccccctttctctttccttccttccttccttccttccttccttccttcctccctccctcccttcctccctccctcccttcctccctccctcccttacttcctccctccctcctctccctctcctgcctctctccctctctccccctttctctctccttccttcctttcttcccttcctccctccctccctccttctctccctctcctgcctctctccctctcttccccttttctctccttccttcctttcttttccttccttccttcctttctttcctttctttctttctttcgccttcctccctccctccttccctccctcccttcctccctccctccctctcctgcatctctccctctctctcccctttctctttcctcccttcctccctcccttcctccctcccttccttcctccctccctccttctctccctctcctgcctctctccctctctccccccttttctccccttccttccttcctttcttttccttccttccttccttcttccttttctttctctctttctctttctttcctttgccttcctccctccctccctccttccctccctccgtccttcccaccctccctccttccctccctcccttccttcctccctctctccttctctccctctcctgcatctctccctctctctcccctttctctttccttccttccttcctctctcccttctttcctccctccctccttctctccctctcctgcctctctccctctctccccgcttttctctccttccttccttcctttcttttccttccttccttcttccttttctttcttttctttttctctttctctttctttctttctttctttctttctttctttctttctttctttctttctctctttctttttctttctttctttctcttttctgtctctctctctctctctcccccacctttttttttcagacagggtcttgctaagttgcccaggctggtctcaaactcctggcctcaagtgatcctcctgccttggcctcccaaaggaggaattattatcactattttgccttagatgtgataatggttgtatttttacatacttatgttttggagatacctgctgaatattgatgggtggaatgatagaatttaggggatttgcttcaaaatagctaggggaggcagtagggggaggtacagaagaaatgaaattggccatgaagtgaccattgctgagtccagatgatggatacatgggggctcactatgctgttctacccttttacttgcttgaaattttttataagaaataaagcttcccaggtggttctgatgatcagccagagctgggaacccctggcttggctgatccgcagaggctgattcctagctattattctctgaccttccatgtcgcagaaattatgatggtaatcagaactggatcatgtttcctctctagtttggaggaggtcatgagataccttaacaagaaaagggtctgggggaccggcatggtgtctcacacctgtaattccataggccaatgtgggtggatcatgaagtcaggagtttgcgaccagcctgaccaacatggtgaaaccctgtctctactaaaaatacaaaaattagctgggcatggtggcactcacctgtaatcccagctactcaggaggctgaggcaggagaatcccttgaacccgagaggcagaggttgcagtgagctgagatcgcgccactgcactccagcctggcaacagagcaagactctgtctcaaaaaaaaacataaaaaaaagaaaaaaaagggtctgaagggtctggggaaaggtcccctgacaaatcagttcatccaggacatgaactgacctgcaatccgctcggaataggatgtcggatcaaaattgtcttgttccttagagaaatagcctcctttcccataaaaagacaggaggagatctatctttatttatttatttgtttttaaaaacagagtctcactctttgtccgggctggagtgcagtgacaagatcatagctcaccgtaacctccaagtactgggcttaagtgatcctcctgcctcagccttccaagtattcttgactacaggcatgcatcaccactccaggctaatttttaattttttttgtagagagatggggtcttgcaactttgcccaggctgatcttgaactcctggcctgaagtgatcctcccacctcagcctcccaaagcactgggattacaggtgtgaaccttcacgcccagctttctatctttattttgaaaagtaaaataaatacaaattattagttcattgatttattgaactaattatttattggattgctactgtatgccaggcactctgccaagctctatcgaagttctcaaagtttaatttggggcctggcatggtggcttacacctgtaatcccagcactttgggaggcagaagtgggtggatcacttgcagtcaggagttcgagaccagcctggccaacaaggtgaaacctgatctctactaaaaatacaaaaattagctaggcgtggtggcacatgcctgtagccccagctacttgggacactgaggcacgagaatcacttgaacgtgggaggtggaggttgcagtgagccgagatcgcacttcagcctgggtgacagagtgagactctgtctcaaaaaaagaaaaaaaaaagttgaatctgtagacctctgggatcccagagattctttcaaggggtctacaaggtaaaaaccattttacaatttatatttatttacgataatactaagatgtcatttaccttttattttggtatttgcacagatggtataaaaccaacagcgagtaatactgcttgtacttgacgttaatttgtcagtggcactgactgtactagaactcattgtattcttcaccactcacagtttatttatttatttttactttttattgatttttatgttttgagatagaatctccctctgtcacccaggctggagtgcagcagcacaatcatggctcaccacagccccaattgctcaggctcaagcaatcctcccacctcagcctcccgagtagctgggaatacaagtgtgcgccaccacaaccggctaacttattttattttatttatttatttatgacagagtcttgctctgtggcccaggctggagtacagtggtgcaatctcggctcactgcaacccccacctcccgggttcaagcgattctcctgcctcagcttccctagtagctgggactacaggcatgggccaccatgcctggctaatatttgtatttttattagagacagggtttcgacatgttacccaggctggtctcgaactcccgacctcaggtgatctgctcacctcagcctccctaagtgctgggattacaagtgtgagtctactcacagtttaaaacaatccactttcacttaagaatgttcctaatgaagcagtaagaattagtgttattaaatttgaattctcgagtccacttctgaagattgtgacggagtgaacacagaacaggattccgccacacactgggtacaatggcttttcaaggtgagacactggtgcagttgcttgagttgcgagctgaactagctgctttttatcatggcacactgttttacttggaagaaagttctgacacatcaaagtacagatattcagactctggtatttggcagacattttctcaaaaatgaacaaaatgagcctgtcacttcaagggaaacaactggcagtatgttttgccaatgataaaattcaagctttcaagttgagcattaggattttgggaaaacttgttatctgccaccaagagcttgacagcttctcaatttctttctttctttcgttctttcttttttgagatggagtttcactcttgtcgcccaagctggagtgcaatagcaaggtctcggctcactgcaacctctgcttcccgggttcaagcgattcttttggctcagacacccaggtggctgggattataggcgcctgccaccatgcccagctaatttttgtatttttagtagagatggggtttcaccatgttggccaggctggtctcaaactcctgacctcaagtgacccacctgcctcggcctctcaaagtgcagtgctgggattacaggcatgagccactgtgcttggacagcttctcaatatttagataccttttagatgagatcactagtgatatttttaaaatgtgatttttgatattgtataataaaactgacatttggaagttttgcatagcttagcgaaccaacattttccaaatgaccaatgcgtgatgttacaaaatcattcaaagtgcaagatggatattaccaagtaatccttctcccacctaggacacagtaagggagaaacagcagttgtcccaccctagcaaaagcaggaaaattgcaaaagcaaagagccaggaaacctcaaaagcaaactttttcttgaacctactggaaagctgaaggggcagggcaactgtgtagcctgaaatctaaggaaagacagttgcctccccagtgatagatgggacatgagcaccagcttacctgtgtgcagtacaagaggaagaggttcctggtgccatgcacgagagaaaacattatttagctaacatttttagcaaatttgctggagcctgagtgcaaactagagtaggcatataaagtcctgggcactgcagactcaaggagagttttcatagacctccagtttatgagaaagaccaggagcagagcaggacaccagagaccacctccctcgttggtacagggctagaggatagtgacaactgaagacaacgaggctcatttggaaaggagagctttatttctcataaagggttgcagcctgcagagtggccattctgacaggctgggaagcatagcctctggtcacaagccagaaacagtcacttcaagggaggagcaaagggaataggaatttatgctgagcgggatggctgaacatacatatttaataagatataggagtcatgaatatttatgaaaggagaaacacatgtgcaagtgtgcttcatgtcccttcatgggtcccatgtacaaaaacatggcagtatcagcctgattcaagggtggagttttcagccttctgatatcaaaaggtgacatgaagatgtagaaacctttattgagcattctccatggactgaccagaccatggaggtctcttatcaggtaaaaaagaaggagcagcctcaggtggttataggtgatatcagtgtggagtcttttgaaagggctggtttctgtttagcccttagggaagaaaatctaattgtagttagtgatgaagggagcgttaacaatgaggtgcatcagaccccctatcccatcatggccaagcattctgttttcaaggtgactctgcattcccttggccaggaggtggtccattcagccagttgggtgggggtgggggggcacttagaattttattcatatttctagataggattggccacatttgtgggaaaggcataaacaccatccagactcttcatttctttcttttttaaaaacaattattattatactttaagttctagggtacatgtgccaacgtgcaggtttgttacatatgtatacatgtgccatgttggtgtgctgcacccattaactcatcatttacattaggtatatctcctaatgctatccctccccccatccccgaccccatgacaggccccagtgtgtgatgttccccaccctgtgtccaagtgttcccattgttcaatacccacctatgagtgagaacatgtggtgtctggttttctgtccttgcaacagtttgctcagaatgatggtttccagcttaatctatgtccctataaaggacatgaactcatccttttttatggctgcatagtattccatggtgtatatgtgccacattttcttaatctagtctatcattgatggacatttgggttgattccaagtctctgctattgtgaatagtgccacaataaacatacgtgtgcatgtgtctttacagcagcatgatttataatcctttgggtatatacccagtaatgggatggctgggtcaaatggtatttctagttctagatccttgaggaatcaccacactgtcttccacaatggttgaactagtttacagtcccaccaacagtgtaaaagtgttcctatttctctacatcctctccagcaactgtcgtttcctgactttttaatgattgccattctaactggtgtgagatggtatctcattgtggttttgatttgcatttctctgatggccagtgatgatgagcctacctccctttattttttgagttggagtcttgctttggcacccagggtggaatgcagtggtgcaatcctggctcactgcaatgtccgcctcccaggttcgagtgattctcctgcttcagcctcctgagtggctgggattacaggcacacgccaccacacctggctaatttttgtatttttagtagagacagggtttcaccgtgttgcccagctggtctcaaactcctggcctcaggtgatctgcctgccttggcctcccaaatggctgggattacaggcgtgagccactgcacctggcccagacccttcatctctactcccctagaaaacaaaaactataagctgccatagggaagtggggagggattactgagaaagttctacctctgagacccaaggacacaggaagcatgaagtaacaagtaactgcagttttcccattaggaggggcaagagtgtggggagagcccctcgaggtgtgagtgcacagagaagaccagaaactgagggtgaggaagaaatattaagaacgacccttgggaggtaattccagggttttaggaggctgaggcagggagattgcttgaggccaggagttcaagatcagcctgggcaacatggcaaggcccagtcctgacaaaaaaaatttaaaaattagccaggtgtggtgatgcacagctgtagtctcagctacttgagaggctaaagtgggaggatcaattgcttgaacccaggagttgaaggctgcagtgagttatgattgcaaccactgcactccagcctgggtgacagagcaagacgttgtctcaaagaaagaaggaagaaagaaaaaaagaaggaaggaaggaaggaagtgttagatatgagttctaaatttattttcaaagaatcaatatgtcagtatgttcaattctttaccttctacttttaaacttaacttccttataaagcaaccttttttgattacctgctccaccctgactcatttcaatcacctgctccaccctgactcattctgattacctgctctgtcataaccatttttcctgccaaagcactcaccccgttattagccaatcagaattagtttagcctgtgcggtctaactctaccaataggggaacaacacagcagcaggggccatgtgggtcacggataagaaccccttcccctcccttgtccaagtgtgcgctcaccattgctctatctgtaagggcgcacccttctatggaagtaccttgccttgctgagaattaaaagaaaattttatatttgagtgcaattggttttgcggcactgaaactttacatataacaggaggaaggaaagaagggatggagggagggagggagaaagaaagacactgaagcaactcaacccccatctgaagcacaaggtaattctagaggaatttgaacctagtgttacactgacggaaaccatggcaataacaaaagccaaacccagattgactcctgactggattgcctcaacttcccattggttgctttccacaaccaatcagacagatttcgggccaccacttggtttacacgagttgaccaccaagtggccaatgggaaacctgtagggagtatttggacccaagaagattctgtatccgggcccttgagcccctatgctcgagcccgctcctgcactgtggagtgtactttcattttcaataaatcccttcattccttccttgctttgtgtgttttgtccaattccttgttcaaggcaccaagaacctggacaccctccaccgatgacactgagaggtgttgcaggaactcccaaatttgtgttgattaatttttgtatttttagtagagatgggatttcgcgatgttgtccaggttggtctccaacttctgacctcaagtgatccacctgcctcagcctcccaaagtaagaccgatgcctcaatgctgtgcctgcaattgcctgttcctgctgtttcagggtagttttgtttgtgtccggttcctgctgtcctccctgccccacacaggaggcctctgtgcaggacacacagccgttcctcgagagccactctgcacctgctgtctgcactagctacagaagggtccagatgagtgtctgcacaggtaggtcttgccgctgaagactaagccttgcaaagcaaaccaggagaaatggattttggtatgttagacaggcaggcagtcttcgtcctagttttgttttgttttttgcttagtaactgctattgcaaccataatattttcatccttctttccttctgaaattgtgcctcaaagagttaaagaaatcagtaactctgggcacagtggctcatgtctgtaatcccagcactttgggaggctgaggcaggaggactgcttgagcccaggagtttaagaccagcctggacaacacagtgagaacccgtctctacataaaataaaaattagctgggcatggtagcgcatgcctgtcatcccagttactcaggaggttggggcaaaaggattgcttgagcccaggagttcaaggctgcagttagtcacgattgcgcaccactgcactccaaccagggtgacagagggagaccctgtctcacaacaacaacaacaacaacaacaacaacaacaacaacaaaaccagtaagtaacagaaattcttgagtttgcaggatagcagataaggaaagaaacaacttgctgaaatgctgaaactcctttcattcgtaagataataaaactggctgaaatcagttggaacgaatgtggccaactagagtctgtgcagaaccagcttgctgacatcacagcctgaatttccatcacgtttcagataactccctctgaatttgcacacgcgaaccataagttagcatgagaagataatcatgaatcctcaaggattctgcccatctccctcttccttccaccaatcacctgctaatccaaccccaaaacttgactaataaaatgactgccttaaagccaggagggagacagatttgagctggatgcatgtctccctgggagtcaacttttcttttttcctttttgttgagagagagtctcactctgtgcccaggctggagtgcagtgaagcgatctctgctcactgcaacctaggttcaggcggttctcctgcctcagcctcctgagtagctggaattgcaggtatccaccaccacacccagctaatttttgtatttttagtgcagacagggtttcatcatgttggccaggttggtctcaaactccagatctcacctggctgacccttttaaactttacctcaaatatatagtggtggatcttttcgatttctgtataaatggattcacactctaaatatcctactatgacttgttttctttctttaacaatatgaataattggccgggcgcgatggctcatacgtgtaatcctagatggttgggaggccaaggcgggcagatcacctgaggtcaggagttccagaccagcctgggcaacatggtgaaaccctgtctctactaaaaatgcaaaaattagccaggcgtggtggtgggcgcctgtaatcccagctgctcgggagattgaggcaggagaatcacttgaacctggggtgtggaggttgcagtgagccaagatcgcaccattgcactctagcctgggcgacagagtgagactccatcttaaaaaaaaaaaaaaaatatatatatatatatatatatatatatatatatatatatatacgtgtatatatatatatatatatacacgtatatatatatacacacatatatatatacgtatatatatacacacacatatatatatatatatatatatatatatatatacataaaattattttgtcctggaggttatattttgttttactgtgacattagtaaagatacagctagtacagaagtcaatgatttcatgaatattattaaatcaaatctttacattaaaaatatgagttggggccaggcgcggtggctcacacctgtaatcccatcactttgggaggctgaggcagatggatcacctgaggtcaggagttcaagaccagcctggccaacatggtgataccctgtctctacaaaaatacaaaaattagccaagcatgatggcaggtgcctgtaatcccagctactcaggaggctgaggcaggagaatcacttgaacctgggaggcagaggttgcagtgagccaagattgtgccattttatatatatatatatatatatgagttggagctgggtgcagtggctcacacttgtaatcccagcactttgggaggccaaggcaggtgggtcacttgaggtcaggagttggagaccagcctggtcaacatggtgaaatcctgactctactaaaaatacaaaaattagccaggtgtggtggcgcatgcctgtaaccccagctactcaggatgctgaggcataagaattgcttgaacccgggaggtggaggttgcagtgagccaagattgtgccactgcaccccagcctgggtgacagagtgagactctgcctcagaaaaataatctacatatatatgtatgtgtgtatgtgtgtgtgtgtgtatatatatatatatatataaaacaagcacagaagtcaatgatttcatgaatattattaagttaaatctttacattaaaaatataagttgagttttgcacacatcgccactgcctccaggggccccatactatcagctatggtcaaccccaccaagttcttcaatgagccctggggccgcatctccatccagctgtttgcagacaagtttccaaagacagcagaaaatgtttgtgctctgagcattggagagaaaggatttggttataagggttcctgctttcacagaattattccggggtttatgtgtcacggtggtgacttcacacaccataatggcagtggtggcaagtacatctatggggagaaatttgatgatgagaacttcatcctgaagcagacaggttctggcatcttgtccaaggaaaatgctggacccaacacaaacggttcccagtttttcatctgcagtgccaagagtgagtggttggatggtgagcatgtgttctttggcaaggtgaaagaaggcatgaatattgtggaggccatggagggttttgggtccaggaatggcaagaccagcaagaagatcaccattgctgactgttgacaactctaataagcttgacttgtgttcgttttgttttgtttttgagacagtttcactcttgccatccagggtggagtgcaatgtcacaatctcagctcactgcaacctctgcctcccaggttcaagtgattctcctgcctcagcctcctgagtagctgggattacaggtgagcaccaccatgcctggctaatttttgtatttttagtagagacggggtttcaccgtgttggccaggctggtcttgaactcctgacctcaggttatccgcccaccttggcttcccaaagtgctgggattacaggcatgtgccactgtgcccagtcgacttgtgttttatcttaacctcaagaccattccttctctagctccggagagcactcctccaccccatttgctcacagtatcctataatctttgtgctctcactgcagttccctttgagctccaagttttccttattcccttccatgcctagctggattgtaaagtttatgattatgaaataaaaactaaataacgacaacaaaaaatatgagttgatttaaataaaaatattaagtaaatattagtataggtggcaagcggatatggcaaaaaaaatcaataaaatttgaatgtgaatggctacaattcaggaaatatggttttaataaaaacagatacaagctgtggcacgtgcttgtagtcccagctgacgcgcaggagggaggagtgcttgagcccggaagttcagggccagcctgggcaacatagtgagacctcgtctcaacaacaaaaatgaaaaaaatcaacaacaacagaaacacagatacatctaaaattgctctggatctttggaacaggtctgccctgaagtggtgttttatgggcctgggcactctggcacaagccctttctgggcacaaggcgaagttgatgagactcatgcttactgccagcttgctccaggccactttcagccaccagcaccatggccttctgcctccttagtctctgtaccttccctgggatttcccccaggcttgactcttctcccaactcctctgtgcatggcctgaacttgcccttgcaacctggcatggatcaagctggcttcctagtttctgccccccagctccattcacccttgggtactggcctcgcttcatcacctctttctgttatctacaccctttgccacatcactttgcagtgccctgtcaatgtgactctgggctggccatgagacctgtgttgaccaacagaaccaggctgaagtgacagtgcaccagttccagaggccctgagtgtctctataccatcttgtgcatttctgccatctctaagataaggacgaaatcagcaggtcctaggatgagggtaaaatatgtggagcagagttgcctcagccaagcctccaacctccagcagcactccagccctcccacaaactcatgaaaaataagacattattgttttttttcagccattgagctttggagtgtccatgtatcggttagctattgctgcgtatttgttgcacagcaatagctaactgatacatggacacaaagcagcagcccctggcccccacccctgttcagtgactgctgtactcacacacagagtagaaaatgcttgcacaagtgggatcaagcattttcccactttcataaccatgccccatggcgttgccactgatattgccctgcctagcactggaaagaggaggtagtgagggcaaatggaacctcttttgctcagtccagggagcaataggcagctgtcacccacaaacgacatggctcccacaatctacttcccagatcatagtcctgcctagctgggactggaggtaggatacaagttagaggtgtattccagccccagggtgctgggtgaggcctggggatgtgtccctgcccacaagatagaactggaatcttcacgtccaccagattctgggcctctctcctatgtcacagatgggaattctttccacattattcccagtgggtcttctcactcttttccaggctccttggaggtcactgccctgatgacaacatggtcttcccttcaaggaagccacgtttctaagagggctctggcatatgcattggtgagttgaagcttgacagtgttatagcttctctgctgttagtgtgaggtttgaggattttactttaaccacatggattagtcagagaaacagaatgaacaagatacagatggcgctgtagacatagctatagacctggaagaggggctttataatggagattggcctgagtgattaggagcctaagaagtcccacagtatgtcatctgcaggttgaagagccacggaagctgatggtatcattcagtttgagcctgaagttctgagaaccaggagcttcaacgtcccagggcaggagaaggtggatgtcccaggtccagaagagagtgaatttgcttttcctctgtctttttgttctatttgggccctcagtggattgaatgttgcccacctacattggtgagggcagatgttttttactcggtctactgattcgagtaccaatctctttgaaaacaccctcccagatgcacccagaaataatgttgcacctgctatctgggtatcccttaacccagtcaagctgacagctaaaagtaaccatcacaccacactttcacaaacacctgggtgcttgcggactcaccttttacaatggttttaccagcctcctccacaagcacaggcaaagtcagtttcaaggacaggagccccccattgttgctcggtgtactggcgatctaaacaaacacgtgcattatagggggtttctgtcattttttagccacctcgctttcatccctggtcctcatgaccccttgatttctttctgaggaattccctccctcccactgtgagaacagaggggccaggccctccgtctgtctcccagctctaggagagccaggggttgagccccaggccagagctcagccaatcagaggctgtcctgtgagcaagtgataccgggactgatgggatggctggagtgtgtgttgcacagatgcaacagcagcacactgaccagaccatgcccctgtgagagccggggtggggctccactgctccctagggctcccaggagctctgcctgccctcagcttcctgtccaggctctctgaaccccctcttattattttgtttaatttttaattttttttagatgaagtctccctttgttgcccaagctggagtgcaacagtgtgatctcggttcactgcaacctccgcctcctggattcaagtggttctcctgcctcagcctcccaggtagctgggatcacaggcatgcaccaccacgcccggctaatttttgtatttttggtagagacggggtttcaccatgttggccaggctggtctcgaactactgaccttaggtgatccccctgccttggcctcccaaagtgctgggattacaggcgtgagccaccacaccttgctgcaccctctcttgttgatccttcttgcttggttaggcagagacagcctccaattcttgcagctacaaggcccgcacatgaaggacaaaatgttttggttaataatgtcttcatgtgtgtaagtcctgtttttgttttccagttgaattgagagttccttttgggcaggaactcttttttccctttgtcctgggtccggtacttggcatgcagtagattctagggcagagctggaggcagggggaggctgcctagagccagagggcttgtgtgtgaggtccgcccctgcactcactcactgggggaccttggctgagtcccgcggcattttcagtctagacattgcatcaattaaacaggtgtgatgcttataatgatcaccctccttcttggcctcagggcctctgtgaggttttaatgaatgaaggctgaagaaactccacagagatggtgactttcccccagcacagctcttgccctcaaggaagagacactcgaccaaacaggcaactggaaacaggatggcttcgtgggcgtgtgtgacttacacagggctgtgcactcagaagaatcccgtgactgacttaggctctgcagctgccatcttgaaattcttaataacttttgaatggtgttgggggtggggttggaggggatggtccacactttcattttgcactgggcactacaaattatgtgaccggctctgattaaaatgctacaagaactaacatgaaactggacacagaaaccagaccccagagcacataccgtatgagtccattggtatgaagtttaaaaacagatggcactagtccaaaggattggaagttggaatagtggttaccaggactggggggaggaagggatggtggatggtgaacaaaaggaccttggagggctcctggggttctaggaatcaatcttccttctttccttccttccttccttcctctttctctctttctttctgtttttatttcaataggtttttaaggaacaggtggtgttggttacatgaataagttctttagcagtgatttctgatattttggtgcacccattacccgaataaaaatcttctctctttcttcctctctccttccttccttccttccttccttccttccttccttccttccttccttcctaccttctttccttcaacagaatcttattctgttgcccaggctggagtgcagtggtacaattatagctttttgcagcctcaacctcctgggctcaagtgatcttcctgccccagcctcctgagtagccaggactacaggaatgtgccaacatgcctggctaattttaaaaaattttttatagagaagaggtctcactatgttgcccagactagacttgaactccttccctcaagtgatctttctgcatcagtcttccaaagtgctgggattgcaggcatgagccacctcacccagccttagaaatgttctgtttcttgacctgagagctggatatacaggattgctcactttgtgaaaattcgctaaggatttgtgcacttttctgcatatgtgttaaactgcagtacaaggttaaaagaaaatgtgtgaaacgacctatacattgcaaaggaaaggccagggtgttgagcttgacccaccttggggatgctcagagaaggcttccctggagaggggtctgggtcaggtcctgaaggaggagcaagggatgggggttgggaagttttgtggctccctaccaagggatgacgtgcctgtctggcaggagctaggctcatgcatggctcgggagagcacctgcttgtactgagtctggctctgcctgggagcttgaggatgcgaatgaattggagacacaaagaccagcttgtgggggccgtggactccactctctgggctcgagactccagctgcagtgtggaggacagcctggggtgggagatgggaggcagggagaccctgcagaggctactggacttcccaggtgagcagtgatggtgtcttgggctgggggagtgtagacaggagaatggattctggagactttattccagtggtagctgtggtggtcttcacataggatcacaaattccttggcatttgtcccatcaagagatgaagtctaatttcatccctcttttttttttttttttttctgaaatggagtcttgctgtcttgctcaggctggagtgcagtggtgcaatctcggctcactgcaacctctgcctcccaggttcaagtgattcttctccctcagcctcctgagtagctgggattacaggcacatgccaccacacccggctaatcttttattttagtagacacggggtttcaccatattggccaggctggttttgaactcctgacctcaggtgatccacctgtctcggcctcccaaagtactgggattacaagcatgagccactgcacccggcttttttttttttttttttttttttttgagacagagtctcactctgtcgcccaggctagagtgctggagtgcaatggcgtgatctcagctcactgcaacctccacctcctgggttcaaccaattctcatgcctcagcctccccagtagctgggattacagacgcctgccatcatgcccagctaatttttgtatttttagtagagatggggttttgttatgttggtcaggctggtctcaaactcctgacctcaagtgatctgcccacctcggcctcccaaaatgctgggattaggcgtgacctacggtgcccggcctaattccatccctcttgaatgtgagctggccttagtgacttgcttctgatgagtagaatgtggctgaagggatactacacgacactccaggctagattagaaaaggccatgccacttctgtctggctcccttggaactcaacaggcgtgctgcaaagaagcccaggctataaggcaaggccacatacaggtgatctggttgactgccctactgagatcccaggtgacagttaatctcaagtccagatatgtgcaagcagaagttttcaagatgaccgcagctgcatgagcctctgaatgagagctgcccggctgcctggctgggagcggtgatttttgccactgagtttggctggtttgctagcagcaagaaaacagcagcctaggctgtttcgaggaatcactagagaagcttaaaaacttcccaccgcccaggtcacgcccaagcattatttttcggagctcccaacatgcatccaaggctgagaaggagtgcaggaggccaaccctgaggcccctgagcctcagtggagacagcagtctgggccgatgtcacgaaacgcccctttcctttccaccacctcccttcactcagctctcttttgtctccgcccacttgtttccatcttcagttcctggtagatgaaagggatccatttaagtggcagggactttgaaatcagtgtgtcagtccctgatgcttgtttattttcaaagcaacataggagaatggatgtggaggggaagcggggaggctctcaagggcagtagtgggaataggattgccagataaaatacaagaggctgtattaaatttgaatttcagataaaccatgaattttcttttcggtagaagggtgctccaaatattacatggacatacttatactaaaagattacttgttgtttatctgaaattcaaatttaatcgaatgacctatatttgtatttgctaaacctggcaactctaagtgtgaagccaggtcaaggtgacacccagaactcatttagggacatttgcagactcccaagttccttcaccagcaaagtaggaaacctctcaggaatcctcaggctcttcctcttatttagagaaagtgaggctccaagacaggaagtaacacattcaaaacaggcaattcttggtttgcacattatcatggtcactaaacacatgtatactgaaaccgtgttcttgctttgctgctatgaatatttgcatagaggtttttgtattgacacaaattttcaactcagttgggtaatgcctgggattgtgattgctgggttgtataagtctatgtttgactttgtaagaaactgccaaactgtcttccagaatggctgtaccattttatcttcccaccaggaatgaaagagagtttcaatttctctacatccttgccaacatttattttccattaattaaaaaaaaatttaaggctgggtgcggtgactcatgcctgtaatcccagcactttgggagattgaggtgggcagattacttgaggtcaggagttggagaccagcctggccaacatggtgaaaccccatctctactaaaaatacaaaaattagcggggtgtggtggcaggtgcctgtaatcccagctacttgggaggctgaggcaggagaatggcttgaacccaggaggtggaggttgcagtgagctgagatagtgccactgcactccatcctgggccacagagtgagactccatctcaaaaaattaaagaaataaaataaaaaaataaaaaataatagctatcctagcagctgtgagatggtctgtcattgtgattcagatttgcatttccctaataattagtgatattgagcatcttttcatgtgcctattggccatttgtatatcttctttggagaaatagctatgcaagttctttgctcattttggggttttccatgaaactcctacaactcaatgacaacaaaaaaacagtgcaatatatatatgcttgatattaaacccttatatataagatacaagatttgcaagtgtttcttctcgttctgtgtgttatcttttcactctcttgacagtgtctctttttttttttttttttgagactgagttttgctctgtctcccagggtggagtgcagtggtgtgatctcagctcactgcaacctctgcctccagggttcaagtgactatcctgcctcagcctcccaagtagctggtactacaggtgccacccaacaccaggctaattttttgtatttttagtagagatggggtttcaccatgttggccaggctggtcttgaactcctgacctcaagtgatctgcccacctcatcctcccaaagtgctgggattacacgcatgaaccaatgagcccggttgatagtgtcctttgatgcataaaagtttttaattttgatgacatccaatttacagtttttttcttttgctacctgtgcttttggtggcctatttgagaaaccattgccaaatctaagatcatgattgcccctatggtttcttctgtgtttgactttaggtcttacgttcaggtctttgatcaatcttgagttaatttttattcatagtgtaaggcaagggttcaacttcattcttttgcatgtggatatccagcttccttggcaccatttgtgttttttttttccttttccatatatattcttcttatgtaaggcaccatttattaaagagactgtccttttcttattgaatggtcttgaaattctcgtcaaaaatcagtacgcgagagggtttattttctgggctctttattctagcctattggactatatgactatctgagaccacaatgttttttgttttttttgttttttgagacaaagtcttgctctgtcatccaggctggagtgcagtggtgcgatctcggctcactgcaacctctgcctcctgcattcaagtgattctcgtgcctcagcctcccaagtagtagacaggaatactactaactgccaccatgcctgtcttttttttttttttttctgtagttttagtacagacagggtttcaccatgttggccaggctggcctcgaattcctgacctcaagtgatctacctgccttggcttcccaatgtgttgggattacaggcatgagccatctgcctggcttcatagtattttgattactgtagctttgtagtaagttttgaaatcaggaagtatgagacctccaactttgttcttctttttcggttattttggttatttggggtctcttgaaattccatacaaattttaggaccagtttgcctacttctgcaaaaaaaatgccattgggattggataggaattgcactgaatctgtggatggctttggagaacattgttgtattagtctgcttgaactgctataacaaaataccatgacaggtggcttaaacaatagaaatttatattcctcacagctctggaaactaaggatccatgatgaaggtgttggaaaagccagtttctcatgaagtttctcttcctggcttgtccatgaccaccttcttactatgtccttggatggtctttccttgcatgcagagcaagagaaagctctctggtatctctgccaggatagggacactaatcctattgaaccaaggccccaccttcatttaacattaattacttccataaaggccctatcttcagaaacagtcccattggtggttagggcactgacatatgcattttggaagaacactaacattcagcccataacaattgtcatcttaacaatattgtcttccaatccatgaaggcaagatgttcttctgtatatttctgtttaatttctttcagcagtgttttgtagttttcgatgtacaaacttgctcctccttggttaatttttttactaaatattttattcttgatgttactgtacatggaattgttttctcaattttcttttcagattgttgtttcctactacttagaaatatatatcctactatatagaaactgattcttgtgtgttgattttgtatcctgcagctttgctgaatttattagctctaacagttgtgtgtgtgtgtgtgtgtgtgtgtgtgtgtgtgtgttgggtgggtattcattaggattttctacatataagattatatcatctaccaagagagataatattacttcttcttttctaacttggctgcctttcatttctttatcttgcctagttgctgtgactagaactcttagtactacgctaaatagtagtggtaaaagtgggcatccttgtcttgttcccaatttagaggaaaaaaatcttcagtctctcattattatgttagttatgggcttttcttatatggtcctaataacgttgaagaggttcgtttctattcctactttactaagtgttttatcttgatgttggatattgtcaaatgctttttcggcatcatttgagatgatgattatgatgatgatgatgattattattattatttgagacacagtcttggtctgtcacccaggctggagtgcagtggtgtgatctcagcttactgcaacctccgcctcccgggctcaagtgactctcctgcctcagcctcccaagtaactgggattacaggtgtctgccaccgcacccggctaatttttgtatttttagtagagatggggtttcaccataatggccaggcttgtcttgaactcctgacctcaggtgattcacctgcctcggcctcccaaagtgctgggattacaggcgtgagccaccgtgccaggcccatttgagattattatgtggttttccccccttcattcctttttttttttttttagactgagtttccctcttgttgcccgggctggagtgcagtggcacgatcttggttcactgcaacctctgcctcccgggttcaagcaattctcctgcctcagcctcctgagtagctgggattgcaggtgcccatcaccacatccagctaattttttgtatttttagtagagacagaatttcaccatgttggccaggctggtctcgaactcctgacctcaggtgatccacccgcctcagcctcccaaagtgctgggattacaggtgtgagccaccacacccggactacatcgatttatttttatatggtgaatcaccattgtgtctctggaataaattccacttgttcatggtatataatcttacaaatacgctgccaaattcgttagtattttgttgagaatttttgtgtttatgttcataaggagcagtggtctgcagttttcttttctctcagtgtctttgtcttgctggcctcatagaatgtgttctttcctcttcaatctttagaagagtttgagaaggatttgtgttacttctttaaatgtttagtagaattcatcttgaaacaatctgttcctgcgcttttttgttggaaactttttgattactgattcaatatccttacttgttatagatccaatcagattttctatttcttcttgagttagttttggtagtttgtgtttttctaaaaatttgtacatttcatctaaggttttctgattttttggagtacaattgtttatagtattatccaatttatttctgcaaaacagtactgtctcactttcatttctgattttagtaatttgactcttttctctttttttcttagtcaattttgttgatctttaaaaacatcaacttttcactgggtgtggtggctcactcctgtaatcctagcacttttggaggctgaggtgggtggattgcctgagcccaggagttcaagatcagcttgggcaacacggtgaaaccctatctctactaaaatacaaaaaaattagccaggcatgatggcgtgtacctgtaatcccagctactcaggaggccgaggcaggagcattgctagaacccgggaggcggaggttgcagtgagccgagactgtgctactgcactccagcctgggcaacagagtgagactcgatctctttaaaaaaaaaaaatcaacttttattttcattgatttcctctatcatttttctgttttctgttttgtttttctccactctaatctttgttattccttctttctttttcttttcttccctttttttttttttgagatgaagtcttgctctgtcacccaggctggagtgcagtggtgccatctcggctcagtgcaacctctgcctcccaggttccagtgattctcctgcctcagcctcccaagtagctgggattacaggtgcctgccaccacgcccggctaatttttgtattattagaagagacggggtttcaccatgttggccaggctggtcttgaacttctgaccttaggtgatccacctgccttggcctcacaaattgctaggattacaggcatcagccaccatgcctggccttattccatctttctgctagctttggttttagtttactcttctttttctagttacctaagccacatagttaggttattgatatgttagtttgctagggccatgataacactttatcacgaagtgagtagcttaaacaatagaaatttattttctcacaattctggaggctggaagtccaagatcaaggtgtcagcagggttgatattttctcaggcctcaccccttggcttgcagatgctgccttctcactacaatcccacgtggtttttcttatgtgtacacacatgctactgttcagatctcttcttctctgttatgacatgaggtcttgctctgtagcccaggctgtagtgcagtggtgagctcatagctcactgcagcttcgacctcttgggctcaagcaatcctcctgccttagcctcccaagtcgctgtgactacaggcatgtgccaccaaacctggcttatttttttttaattttatttatttatttatttatttttagagaccaggtctcactatgttgctcaggatagtcttgaatcctgggctcaagtgatccacctgctttggcttcccagggattggtagcataagtgctgggattacaggcataagccaacatgcccatattattttcttactttccatcctttcgaatcttttgatccaaagtaagtctcttgcagacagcatataaattaataatttttagaaatccattctatcaatctctgccctttaattagacagtttagtccatttacatttaaagtaattaccaataaaggatttaattctgccatttatttaatagctatttgcttttctgtacattttttaaattttgttcctcaattcctccactactacatttttttggtatttaatagattttagtgtatcattttgattccttttttctttccctgtctgtatattttttagttattttcttagcggttgccttggggatcacaattagcatcttaaatttataacaccctaatttgaataatactaacttagttttaagagtatacaaatactttgctcctatacatctctttccctccctctttatattattattgtcccagatcatatctttatacattctgtgcccattaacatagatttataattattgtttcatgcatttgccctttaaatgataggtgaaaaacaaagtattatgaacaaaacctacaataatactggcttttatatttactgatgtatgtagttactatttttatcagtgttctttttttttctcatcatggctttgaattactatcaagtttcctttcatttcagcctgatggattcattttagcagctcttgtagagcagggctactagcaatgagctttctctgcgtttatttatctgaaaatgtcttaatttctcctttattcctgaaggatagtttgtctggtaggaaattcttggttgacagtcttttttttttttttccccaggactttaactgtgttattccactgcctctgggcctctggttccttttcttttcttttcttttcttttctcttttctttttttttgagatggagtctcacactgtcatccaggctggagtgaaatggtgccgtcttggctcactgcaacctctgccttccaggttcaagcaattctcctgcctcagtctcccaagtagctgggactacaggcacccgccaccacgcctggctagttttttgtatttttagtagagacagggtttcactatgttgaccaggctggtctagaatgcctgacctcatgatccacctgccttggcctcccaaagtgctgggattataggcgtgagccactgtgcccggcacttaaaaaaaatttttttttgagatggagttttgcttttttagagttttgctcttgtgcccaggctggagtgcagtggtgcaatcttggctcactgaaacctccacttcccaggttcaagcaattctccagcctcagcctcccaagtagataggattacaggtgcccaccaccgcatctggctaatttttgtatttttagtagaatggggtttcgccatattggtcaggctggtctcgaactcctgacctcaggcgatctgcccacctcggcctcccaaagtgctggaattacaggcctgagccactgcacccagcccctctatggtttctgatgaaagcttagctattaatgttactgaggactccttgtaccttacaagttgttcctctcttgctgctttcaagattctctttttgtttctgatttttgacaatctggctgtgagtttcagtatgaatctctgagtttctcgcgcttgtaatttgttaagcttcttggacgtgtatgttcatatccttcatcaaatttgggaagttttcagccattatttcttcaaatttctttttctgtcccttcctgttcctcttctccttcaggaacttctactatgcatatgttgatatatgcttgatggcatcacatggatctatcaggctctgttcatttttccttttcttttttttgagatagagtctcactctattgcccaggctggagtgcagtggcatgatcttggctcactgcaacctcctccttcttgattcaagtgattctctggcctcagcctccccagcagctagggttacaggtgcgcgtcacaatgcctggctaatttttgtattttagtagagatggggtttcaccatgttggccaggctgatctcaaactcctgaattcaagtgatccaccctcctcggcctcccaaagtgctgggattacaggcatgagccaccatggccagcctatttttcgttatttatttttctctctttacaactggacaatttcaattgccttatcttcaagttcactggttctttcttcttcctgattcttcagatcagctttttgatctctctagtgaatttctaagttcaagctattgtacttttcggctccaggatttctattttgttcctttttataagattaaactatctcttcattggccttccctatttgttcatatattattttggtttcctttagctcattgggtgtaagacagttgatttaatgtctttgactaatgtttccaatgtaaaggcttccttggggatggcttctattgaattctttttttccccctgtgaataggctatactttcctttttctttgtatgctttgtaatattttgttgagcacttggcattttgggtattattgtagtaactctgaaaatcagattctcctcctcttcagggattgctgatttttgcttgttgagggttgcagccatctgtttgtttagagacttttccaaactatgtttgcaaagtgtgtagtccttattgcatgtggttactgatgtttttgtttcataatctttacaggcaaccagtgacctggaaatgatatctgtaaatttctggctacaaaaaggtgttctttactttcaaatctcctgatggatgctgccataggaagcacaagagggctgaaaccaatacaggagtctgtgctaatccctcaggactcaaaaatgccccaatttttggaggacaagggtcatcttgcccaccttgcaaccagccagccattccaggaaagctattcctgcagcctcatggtagggtgagggctgagaaatggggcatggcagctgttttgcatccaccctgttgctgttctcttaccaacaaccagcagcctcttttttcatcaagaactcccctggctgtttattcatgtctcatgaggtttgcctgtctaattttttgtatctttagtagagatggggtttcaccatattggccaggctggtctcgaaatcctgacctcaggagatccatctgctttgggctcccaaagttttgggattacagatgtgaattattgtgcccagccaaggctgggtaatttgtaaagaaaggaggtttatttggctcgcagttctgtgggccatacaagcatgtggcaccaacacctgctcggtttctggtgaggcctcaggaagcttccaatcatggtggaaggcaaatggggagctgcacgtcacatggcaagtggaagtaagagctagggagcaagagaggaaggaggaggtgccaggctcttttaaacaaccagctttcatgtgaactcattactgcagaagagcagcaaaccattcatgagggatccgcccccaagacccaaacacctcccactaggccccacttccaacattagggatcacgtttcaacatgagattttgagggaacaatatccaaaccatgttagtggccctctattgactccaacatctatgaacagggctggtgcttgccttggtcaactcttgtctcccattcccagtggggggcctggcacatgaagaagggattaaccaataataagtaataaagtaataaggtaataaaataatatttactttttttttttgagacagagtctcactctgtcacccaggctggagtgcagtggcaccatctcggctcactgcaagctctgcctcccgggttcatgccattctcctgcctcagcctcctgagtagctgggactacaggtgactgccaccacacctggctaattttttgtgtttttagtagagatggggtttcaccatgttagccaggatgatctcgatctcctgacctcaggatctgcccacctcagcctcccaaagtgctgggattacagacatgagccactgtgcctggcctaccatttttttttttttctgagaggagtttcactcttgttgcccaggctggggtgcaatggcatgatctcggctcactgcaacctccacttccagggttcaagtgattctcctgcctcagcctccccagtagctgggattacaggcatgcaccaccacacctggctaattttgtatttttagtagaggtggggtttatccatgttggtcaggctggtcttgaactcccgacctgaggtgatttgcctgccttggcctcccaaagtgctgggattacaggcgtgagccactgcgccttgccaatttttttttttttttagacgaagtgtcattctgttgcccaggcaggagtgcagtggcatgatctctgctcactgcaacctctgcctcccaggttcaagcgattctcctacctcagcctcccgagtagctgggattacaggtgtgtgccaccacggcggctaatttttgtatttttagtagagatggggtttcatcatgttggccaggctggtctcaaactcctgacctcaaatgatccgcctgcctccacctcccaaagtgctgggattacaggcatgagccactgcgcccggccaaagctgatcatttgaaagtgtgataagtgctacaaagaaaatttaaaaagtgaggtgagggcagatgcctagaggagaggggaggggcttttgtggacaggagatcaagaaagccctgttattatttgaactgaggcctgagtaatggcaaggaggcaaccatggaaagatatgggagaaatattgcaggcagagagatcagcaggtgcaaaggccctgaggcaggaactagtctggagtatctgaagaagagagaaattgttgtggttggcttgagtggtagggggcttggttggaggtggggaaggtgggtccgacaatgctgaattctagtaggatgtctggatttgattctggttgctgtgggaagccatggagggccctagaagggagactgacatgacctgatcccctttgaaaagctcacccagactgctgagtggataatagtttagaggtgtgcgaattggatgtctttggctgctcatgatagaaaattgtcctggtcatttagaaaatttactggccttttaaacgggaagttcagaagtgatgcagactccagagctggttgattcagccctggatcaagttctgtgatgctgtcaaggattgggttctgttctcagctctgctgaccacagatcgcacttcattctgagtactggagtgtctaggtggtctggggggctgtctgatacacatggggctacctgctttgcacttcctggccaaggggatagactgattccttatgggagcacttttgaagaatgaggaagaaccttctcaggagaggcgtggtggctcttgcctgtaatcccagcactttaggaggccaaggcgggtggatcacttgaggccaggagtttgagaccagcctggccaacatggtgaaaccctgtttctactaaaaatacaaaaattagccaggtgtggtggcacgcgcctgtagtcccagctactcaggaggctgaggcaggagaatcgcttgaacccaagaggcagagggtgcagtgagccaagatggcaccattgcactccagcctgggcaacagaggaaaaaaaaaagaaccttcccagaagcctccaggaagtctctgtttggacgacatcgcacacccattcttgaaccaactatttagaagggagatgcatcaccccctttgcctggagctagggggtgggtcagcttcctacaggcacaggactatgtggtcgcgggttaagcccctaaacgaggggaagtggggtgggcagcagccgatctccattacaagggacaagagtaggggcagcaaggccagatcaatggttgctgaggtggctggggatggagagaggatggtggtggtagaagagatggtaacaatggtcaggtcctggctgttccagaggtgatgatggttggatatgcagtgaggaaaagacaggaatgaacatttatcttttcccaagttgtccttgctttcttcctttgaagccataaaaaggaaaaaaagggtggatctggacttgggagctgggcaggagtgagggaagagaagcagagcaagcaggcacaccaggctgtgactctgcaggcatctctctgcctagacttgtctgtatgatgtggaacgaacacgacccatctttactgctagcgactgcagcagataaggcaaggccactttcacgcagttaggttaataggaggctgtacaaagggctgtaggaggaagtgggcacaggagttctaaaataattggaacggccaggtgtggtagctcacacctgtaatcctagcacttcagggaatccaagacaggaggttagctaagacaggaggctcgcttaatgtcaagaccagcctgggcaacatagggagaccccgcctctacaaaaaatagaaaaattaacaggatgtgttggtgcgggccagtggtcccagctactcctgaggctgaggtgggaagatcgcttgagtctaggagtttgaggctgcagtgagaaatgatggcactactgcactccagcccgggcgacagaccaagactcagtctcttaaaaaaaaaaaaaaaaaaaagaaaagtgggggcaaagttatccttggaaaatttcttagtccattcatagcagcatattaaaattagtacagtagcttaatttatataagagaaaatacaatgtgtacagtaattaatgaacatgcaaaatataattgtatatttcaactcactaaaaaggcacagaaagagttgaatttgctaaaattaaatgtgcttatgaaacagctctagtacatgaattaagctcctagatacagatgcagcgccaaacgacggggagggagatggggcactcaaggcgacacgcggctcttgttgccgagcgtttcctgggcgtggagcttctatagaatgtaagctttttttttttaaggttccaaagcctatatttagtgctttcatatacgtaatctcaaaaaaaaaaaaagaaagaaatatcggcataaaatgtaagcttccagagggatacaaacgcagcccagcgcggacaccgccagccccagccacgcggttcgcatcaagcgcactcccctgggggcggggcctgcgcgagctgggcgtgtcgggggcggggcctgcgcgcttgcttccggcgtgccgcgagaggcggggcgtgtggggaggcgcggccgccacgcgacgcctggctgggcccgcaccggagaggcgtctcggtacctggcaggcggcctgctactcggagcccgctgcggggcggcggcggcggggacatgcacgtgtgagatgcggcagcgggcggcgcggacgcgaacagcagcggcggcggcgggcgcggcctcctgggcgcggggcgcgcggtgcctgagggcgggcgcgcgggcgctgggcaactgccggccgcgccgcctgcgcaggcgctggttcaggactcacacgccgcgctgaggcccgcgggcccgtcatggaggcgcccaccgtggagacgccccccgacccctcgcccccttcggccccggcccctgccctggttccgttgcgcgccccggatgtggcgcggctgcgcgaggagcaggaaaaggtaactagcagccccgcgccgcttccgcctccgcccgccgggctgcccctgcctgtgctctgggccgccgccccgcgtggcctaggcccagctgcccgggcccccggagggaacggggataaacttttgtcacgtgcttctgttgtctttgtctgcagccctttgacttcgcagcggagtgaggggtgtgcagcccgttcgcctgcccaggaaagggggcttctgagctgaaggcgtgcggcagcgcgtgggaatttgggggcgggggcagcacgctgtcaacggaagcgttcgccttaatatttgtagcttgtaatgacctaaacattgcttaaaatgtgtactgtttgttgctctttgattgcacggaaaagttttaccgcgtttgtcatgataatgcttcctgtgcaatatttggttatttaatatttgtcacaatataatgccatttaaacattaaaaaaaaaagagagtctcactatgttgcccaggctaatctcgaacttctggcctcaagcgatcctccccctcctacccttccccacctcgcctcccaaagtgttgggattataggcctgagtcaccgcacccggctcatttttacaaattttaatttcatcgtataataaatgagttttaaactactggtgaaaagggtacaaagttttgtgtttcctagtgggactttatataaagaagtattcccaatttaagaaatagttttattgttaaatctgatttttctgtggattctgtggtctttcagattgattctgtcccctcaagtgtcttgaaattgttactttgaaaagcagtatttaatttgcttaaaatattttatgtcatgtttggaagagcatggattataaagggttaggaagttgcttcaacactataagcagtttaaaagttcttaactttttaattgaacattcctgtataagaacgactgtttacatagatacaaaaatatactcagttctactagatgggggttttgatagaacttaaaaaaccctcgtttgcttggaaaccacctgttgggatgaactgcgggaatctttctttgttctggttggtttaaattattttgtgggttggattttcatttctcagccatttttctctaataacgcaactgttaggtttggaagccatgttttcaagatgaaggtttaaaaatccagtggctagggtggtgactcaaacctgtaatcccagctgcttgggatgtcaaggtcgtggaattgcttgaagccaaggagttcgagatcagcctgggcaacacagggagacctccgtctatacaaaaaaatacaaaaaattagccgggccatggtggtgcacgcttgtagtcccacgtacttgggaggctgaggtgagaggatcacttgagctcaggcgtttgaggctgcagtgggccatggtcatgcaactgcacttcaccctgggcgacagagtgagaccctgtcattcatatatatatatatatatatatatatatatatatatatatatatatatatataaaacttaactagtttggcgtctttaaattagaagacattaatgtatttttttaaaagagaaagatagaaaaagaagaaagaaaaaacagcccctcatgaaatcttactccttttgccaaaacttggcattttttattctttcagagaatgtgacacagaccctcagaggatggtgtttctattgcctttcctctgctgcagtgggttaatttcacctccttcagtgtataatacgtgcataatgctgacttgatatgttttctgccatttggcatattaaaaagatatccttagttttattctgatgttagtgtgactgaaatgcaaaggatactttttggggtgctctgaacagctttctggtatcgtgttgagttacattggaagagagagtaactgctttttcagttacagtcttgtggcaaactgaatgactgttttctgtagacattgactgtgctaccaaattatttttctgtgttgtgttaatgttaattcggcacacaaaataaccacgtatatctgtcatgggtgtgtaaaattatccccagttcaggaaaaagcgcgtcagtatttaatctatctttatttaatagaagcatttgcttcagtggacaggagacccacaaggccacaaaataaactgattagatagctgcactgtaattatagtgtagtacaggaaaactacccagtaaatcggcagtgaaaattttttgtgaagcaatttatttaggctttaaagctggcccagttgtgggagtacagtgagttctagtaaagtagaagcgtagtgacatcctgagtgtagaaggggaaaatgtcatagtagcttcatatgtggcacttagtattcctttatgaaagatgaatcaaacatgcttttaagctcttggcctttccctacatgggttttgtgagacagagttaaactctgcagaaaatgatttgaatgactgttctcagttttccctgagagggtacctacctagttggctgtagatgcagagagagaaatgagttccttacacacagtgggtgccttaggcttagggcataatcttctctgggagccttgattgagaggggctggtaggtaatgtggcttaaatgttgctcattagttttgctctttctttttttccaaattcagctaaggagtataacaagttttacgctctctctctctttttttcttgtatgttctctggaacatggaataaaaaggacaaaaaattggcaacctgaggaagaggacagacaaggggcatgaacaagccacaacctctaagtgacaatatctgtagtcagcggttaggatcaaatattttaacattgctttcacttacagtcaatggtgaaacatttccaaaacaatttattttagttagaacttcggtttgtttctattttgatctagcaataaaacatgtaagaaacattccctgcagctttgtttataaagagaaaaactaaaagtctgacattgggggattggttaaataaatcaggagctgttacgtaggcattgaaaactaggacagtatgtatagggtggttccagttacgtttatataaatatttacacattttacataggaaaacaccattgttttaaaagtacacaattttattattttacctaaaagtttgtaaaattggatgggatttttttttttccaaaaaaagctattgataaaacttattttaattttaacgaaaattggaatgttactttaattgcaaaacactttctgagcctgaaaaatggctcttggctggtttgaatgccggttaggcaggtttatttcttggttacttcagagctgatatatataatttattcaaacaaccatcttccagttgatttccttcccccccccaaaggttttatttaatcttcatttgttataagatacagggagaggagagaaattcagatcatcctttttttgtctttaactaaatctgtttttactaacagcagtaaaatatttgttggaaaaatggaagcttaacctgtctagactgtgacctataccataaaatgtgtggtctaggactgttgtggagtgtcttgggctgttcagggaggtttccttgtactaagatcttgttaaatctgattctaagaattgcattatgttgaaatttttgtttcttggctaaggtgatgtttctgagatacctgtattttatctctagatactattagcttttattagcagaactactgagattttattgtaatattttaaaaagtggtggatccagtatcgtttttataggcttatttgcaggataatagtaagattagaaaattcattaggataatatatttataattgagtgcctcatgtagttctcacttggaattttggaatagcttatacttcctgatatagatccttggggaattaaatgcattaagagtaaatattttaaattttttataaagcagaacagctaatttaacttaatggagggttttcatatttcttgtgataaactaaactgcacatagtttaaagaactgtcagccacgtaggccatataacagctattctttccaagcctagaatccatgccatagaatttatgtaacaaatatttaatgagtatctactacatgccaggcatgttctgctgagtgtgcagtaatgaacaaaatacagcaagttctttctttcatggttacactctaggggtgaaggcatgcagttacatagccttaccttgggtgtttggtaggtaaggctaagtagaaaaacaggaaggtaagaggcgtgtagagaatgagggatgtgagtggagggatggtgtcttctgtaagccatcagagagggcttctctgttaggttccatttgagcagaaacttgaaataagtggggagtgagctgtgtggatatatggaggatattttagagaagagctttctagccagtatgagagcagtaccagatcattgtaagagttttggttttcatatttgtgagatgggaaacgattggaatgtgttttgaggctgatcttaaattatatccatttgtcatgcatatgtgaagaaatggacggatggaattacattatagggagcaactctgtgtgccacgcattgtgatagatgtttacagatccgatcttagaattttcattaatactgtttatttttcagatgaacagtttgtttctagtttttgcctggaactttctcatggcgtgtttgtgtcttcagttccacttagaatgctttttctaaggtggttataccagtttaccgcttgctagcagtggacagaagttctccctgcttcagtctttaccaccatgtgtcttttcatatttgctagccaatctagtgatgagtaatgaggttgatgaccttttcagatgtttattggctacttggatttttgtgttttgtttttgtgaaatacctgctcatctgttaactactttctattgggatgttagttatattctaattgattcatagtaatgactgcctttccaattatatattgtaagtttcttccctggtctgtggcttgacttggagcacttacagtggtgtctgtcctttgatcaacagacatttttaattttaacaattgtttccttcatggttagtgttttttgtcttatttttaagaggtctttcttactacttttctgaagatatcctcttatattgtctaatagaagctttactgctttgcttttcacattgagaatctacattctacctggaattggctttgtatatgggggagattgaggtcaggtttcatttttactgtatggatacctagttgtcccatcagcatttattggaaagagtgtcatgtctccaccgcattgtcatctttgtcataaatcaggtgactgtgtaagtagatcagtttcttgactgttctgttggcttgtctgttcttgcagcaaacctacactgtctaaatcattatgactttgtgttatcttggtacctggtacatggtggtgtagttttagttgtggttcctcaagattgcctttattttctcctttccagtccgtatgctgtttctttctttttcttgcttttgatactggccagttcaagtgctggtagtgggcatcaggggtcaacttttaaacatttaccattaagtgtggtatttactgtgagtaatttttgtatttgcttttatcagattaaggaaatttccttatattccaagtttgctatgagtttttatgagtgggtgttgaattttagaaatgctttttctaaattgatttaattatggtaatttattgaaaagagtatatttgttctgtaagttctgtaacttcaataagtaatgttgaagttacttttttttgccttcaagcatctgtttaacaaagcacatcttgcaccacccttaatccatttaaccctgagtggacacagcacatgtttcagagagcacggggctgggggtaaggttatagattaacagcatcccaaggcagaagaatttttcttagtacagaacaaaatgtagtctcctatgtctacttctttccacacagacagcaacaatccgattcctttatcttttccccacatttcccccttttctattcgacaaaaccgccatcgtcatcatggcctgttctcagtgagctgttgggtacacctgccacacggggtggcggccaggcagagggagtcctcacttcccagaaggggcggccgggcagaggcaccccccacctcccagacgggaccgcggccgggcggaggcgccccccacctcccggacggggcggctggccaggcgggggctgccccccgcctccctcccggacggggcagctggccgggcgggggctgccccccgcctcccggacggggcttctgccgggcggagacgctcctcacttcccagacggggcagctgccgggcggaggggctcctcacctcccagatggggcggctgtggggcagagggggctcctgacttcccagatggggcggctgccgggcggaggggctcctcacttttcagacggggcggccgggcagagacgctcctcatctcccagacggggtcgtggccgggcagaggcgctccccacatcccagacggggcggcggggcggaggtgctccccacatctcagacgatgggcggctgggcagagacgctcctcacttcctagacgggatggcggccgggaagaggcgctccccacttcccagactgggcagccgggcagaggggctcctcacatcccagacgatgggcggccaggcagagacactcctcacttcccagacggggtggtggctgggcagaggctgcaatctcggcactttgggaggtcaaggcaggcggctgggaggtggaggttgtagccagccgagatcacgccactgcactccagcctgggcaacattgagcactgagtgaacgagactccgtctgcaatcccggcacgtcggggggccaaggctggcagatcactcgcggttaggagctggagaccagcccggccaacacagcgaaaccctgtctccaccaaaaaaatacgaaaaccactcaggcgtggcggcgcgcgcctgcaatcccaggcactctgcaggctgaggcaggagaatcaggcagggaggttgcagtgagccgagatggcggcagtacagtccagcttcggcttggcatcagagggagaccatggagacagagggagagggagactgtggggagacgggagggggagggggagggagaggttacttattttttaagaaaggcacagttgtaagaatatgtttgcttgtatagccgaaggcacattccgttttgtaggtaggtgagttttcagaactcattacttgtaagttttattttagataaacttcttgttgttggcacttagtattgtgccagtaatgtgccataagaagagacaactttggttttagttctttggaagttgtcaataaacataaaacagtatttcaaggaggaaaaaacccatttcattgttttaggcttctctagattggaagaaaagatggtaatggtcccaaaacactggggggaaagggggaagaaggtgcgtggaatctgtgatttggccataactgctttattttgttttacctgttgttatcatttttagtttaagaaccttttagcttgtatcacttgcccttatctccagagtgatgtctcaatctttttagtctgtcatatgcaattttccccccttaaactacaactgtttatttgaaaaattataaaagtacaggaaaggtgaaagaacaatatgatgaccactgtttagagtaatcagttagcattttgtcctatttgcttttctctttatatattccttttttttcccttttccccctgcagaaccattcaaaagtgaattgcagacatcatcacatcaataatactgaagcacttatcattttacatcaaggtcattcttctacataaccatatctttttttacactcaagaaattaacattgacatgtaccatattcacattttctcagtttttctaaaaatgtcctttataactctctttcaatgcaagagccaatcagagattactatggcatttgactctcttagctccttaatcttctttcatctaaaattattccccgccaccttctgtctttatgaaattggcatttttgaagcgttagatcagttttcttgtagaacgtcccacaatttggagatgtctaatgaacataatcatgaagaaacaaacatttttggcaagaatactacgtagatagctggttggtggcacaagcctatagtcccagttactccaaaagctccgaaggctgaggcaggaggtggagtccagcctgggcaacaaagtggtaaggtcctgtctctaaaaacacacacacacatacacgcgtgattacatagatgatgatgactttccattgcatcacatcaggagacacataatgtcatttttgtcccattattagtgttgctaaccacttgtttaagatgtcaagtctctccatcataaagttacctttaaatggtatagtacttgaagacagtgtaaatatcctattcctcaaaagccttttgccatggatgatccttgcctaaatcagttatattggtgtttgctaattagtgattttctaacaatgtatttattagtttatgtttttcgagcaacaagaactctagcacccccccctttagtttcacaataaactcatttttttgttgtttcaagttgagagtgatgtgatttcttcattccttttgatgttcaaattgttctaaatttggccaatgggagccccttcaagctggctcaagcatgcattctttttttttttttttgagacagagtttcttgttgcctaggctggagtgcggtggcacgatcttggctcactgcaacctccgcctcctgggttcgagtgactctcctgcctcagcctcccaagtagctgggattacaggcctctgccaccacgcccagctacttttttgtatttttagtagagacgaggtttcaccatgttggccaggctggtctcgatctcctgacctcaggtgatccacctgccttggcctcccaaagtgctgggattacaggcgtgagccaccgtgcctggcttgtgcattcttttttcattatttgatcgttaccttgctttctggcacaggatgttccaggcttgccctgtagtttgccttagtcctgaaattgactgtttcttccaagagccttataaaataagaaatgcttagaaaccaagatatggacacaagtagtgctgattgctgctggggtgttaattgcatcaagcagacagtactaaggaaatatattaaccttcaatataccagaaaaagcagtcatcaccatttaccatctaggtccagtggatcctgtttactgtttatatttttaagtaatttttgcaaataatttacaggtctaagaataagggttagtgaaaaacaattttattggaaagtttaatcagaatttaaacacagcagttctctttatattaagcaaatcttgatgcacaaagattataagagatttaagaatactgccacatgtcctcttagaacaatgagattatccaggttcttgcatcatgaagtctttcctgttgaatgactgactggatgggaatatcctatttcctttttgttcttacaagtatagtgttcactcacggattcttaatttttccttattctaatcagtcaactcttttttaacattcactaagttcagatgcatgtagttttcttcctccattggcatggtttcttctaggacttaaaacaatacaaagataaaccattacagaatgcctgctttaagaacctatttctggtgtcttcagggtttttttctcctagcctctgacctcaagaatttaaaaaacttacaggagtagaagaggaaatagagtttagagatcttttattctagcaatcttgttttattatggtaaactaaatatatttaataaaatctgccatttaacatttcttgtgtgtatacttttcagtgacattgattacattcactgttaggtaaccatcactattctttctaaaactttttcgtcaccccaaacagaaactctctacccattaagcaataacgctgtcattctcccctcccccaaaccccaagtcatttatgactatacattttgttgcttgtgttttttggtgtcatatctaagaatccattgccagatccaaggtcttgaagatttatacctatgtttccttctagggatttcatgattttagcgcttatatttaggtcattgatccgttttgagttaatttctgtatattcattgattgttgattttgagaaaattcatctaggatattttcatctgaaggctcataatctgagatttaatttatgctctcatttcaccatcacgagtgtctttctgcgctaaccaatgtggtagccattaaccacatgtggctattatacttaaattcaaaattcaaattaattaaaattaagtaaaataaaaattcagttttttggttacaatggccacatctcaagtgctcattagtcacatttggctattgactgttgtattggtctgtgctgatgaagattcccttcatcaaaaaaaaaatttattggacttcattggtcaagagtgctactagctctttatattcataatctgattcatttaataattgtgaagtatctttccatcacttttttcctctttccattataggcagaaagtaaaaacaatctgaattctcaactgtgtttattgaaagcgaaaagcagagtacaaagatggtgtctgttatcatttatactgtcttgaaagatgatgcaatatcctaggcaatgcagtagacaatggaaggatgatattttgctgttgattgcattatccttctgagtgattccataattcttccattttctcattttcttattagttttttttttttagagcgtagttaggaatagttgatcataaaataattactaaggtgatgatgaaatggcaagatgcaggaaaaacataatcactaggatcctgtagtgtatcttagacttacaaagccactgtattcatatggtaattgcagaataaaatgagttttttttttcttaataggaaaattttcttttgattccttggaaggcctctaagagaagataaaaggcatgaaatattaatccttgcaaatagttagaactactcaagaaagaaactaaaaaaataaaactgggttcaatggaccctgactgtataccctgatactttgaattcaaatccattaccacaaggttcttcttaaattttccccagtctatatttgaaactccccttctttcatagtgaaaaccttggttctcaacatctgcatttattcatttgctctatcctacaatatatacaaaatagcttcagaattactgcattaataccactgccaatggcaaacctgaagtaaagttcaaaatgtctttgcagtttcattggcttttgtgtaattaatgcttttggggtgtacagttagggtactgatcccaaaagtcacttgaattactttttttctgtgcagttataccttggatttttatttatattgaatcttagtatttgttttttatctttttcacttaattgcattttatgaatacatgaaaacatttgcatggttcaaaatcacaactaaatcaaaagttatccctactgaggtaattctgattcattcccattcctgctcttacttacccctacagataaacttttttttttttttttttttgagacagagtttcactcttgttgcccaggctggagtgcagtggcgcaatctcggctcactgcaacctccacatcccaggttcaagcaattctcctgcctcagcctcccaagtaactggaattacaggcgcccaccaccatgcccggctaatttaaaaaatatttttagtagaaatggagtttgaccatgttcgccagggtggtttcaaactcctgacctcaggtgatctgcccgcctcagcctcccaaagtgctaggattacaggtgtgaaccaccacagccggcctagataaccatttacattcacttttgacctgtccttcctctgtttcttcttcaaaaatacatgtgttcactttatctcccctccatactgctttcttatacaaaaggcagcttattttgccttttgttcatctcattaaatgataaacctgggaattactctggttcatagagatattcctcatcattttttttttatttttttggagatggagtctcgctctgttgctcaggctggagtgcagcggtgcattctcggctccgcctcccgggttcatgctattctcctgcctcagccaagctaattttttttttttttttaattttttagtagagacggggtttcactgtgttagccaggatggtctcgatctcctgacctcgtgatccgcctgcctcggcctcccaaagtgctgagattacaggcgtgagccaccgtgcccggcctccttatcatattttgtggttgcatagtgctttatgtctgtgtcatcagatattcagctgatatcttattgatgggcatttggtgttttttagtctcttgatagtatagataatgcctcagtaaatcactttatgcatatgttgtttctcatttgtgaagtaactttgggtaaagtcctagagttggattactgagtcaaagggtaaatttgtttagctttatccatatttataaccaccctctcaatgaactattatgtttaatttaatttataatgtgaaataaaaatacataagagaaatagaagaatattatatctgaaaactaggaattccttgaattggctgtttcctgtgatcttcattgccattttcccagttaccatttttttcttttctttttttttttctttcttcctgggttcaagtgattctcctgcctcagcctcccaagtagctgggattaacaggcacccaccaccgtgcccagctaatttttatatttttagttgagacaggatttcaccatgttgaccaggcaggtctcaaactcctgacctcaggtgatgtgccctccttggccccccaaagtgctgggattacaggcgtgagccaccgtgcctggcccagttatcatttcttacaaaagaggcagtaattcctggctggccttggtagttccactttgttcctcttctgtctatttcccagagtagtctttttttttttttattttttgagatggagtttcgctcttgttgcccaggctggagtgcaatggagtggtcttggctcattgcaacctccacatcctgggttcaagcgattctcctgcctcagcctcccatgttgctgggattacaggtgcccgccaccacacccagctaatttttgtatttttagtagagatgagcgccatgttggtcagtctggtctcaaactcctgacctcaggtgatccacctgtcttcggcctcccaaaattttacaggcatgagccacggcgcctggcccagagtagtcttttttttttttttttttttaagaaggtccaaatcaataggtcttttattgcatcattgaaatatcacaagtatgtcttaggagtcatctggcatcttctttctgtagctggataactcttagatctgattcatcaacctgctgaacagttcctttttcagagacatagataccatccaaaaatttcctgatatccttgtttttaactgttgtgggttgctgaatcaaagctgctgaatttgaaacaagctcagtgtcatttccttcaaggattaattcatctttctgggcttgaggtactgaacaggcaacacctggtctcatctgaaccctgcggatgtatttttcacccaagaaatttcggatttcaacaagagacccattctggataacgacgttgatgggggaagtgagcatacacagacctcatcttgtaatggaagcccagtgtaacacccttgatcatgttctgtacatgactacaaatagtccgaacggtagccagttcctttctgttacccgaccatttgtcaacccggagcctcttttttttctttccaaggagtctgagttctacgttgatgtgattgaagtccttccgcagggttcctctggggccctttatgataactgtgcgtcccttcagagtaacgttgacattttctggaatgtcaacagtctgattgctgagaatggtcttcattctcacagtaaacgcagcaaaaaaaagtggcccagagtagtctttttaagaatgcaaattggatgatgtcattttgtcattttcctgcttataattcttttggatttatcagcaggaaaaccgtaaaagaaatacaatttatgttttgaaattttaaaatggattccaagtttctgttgacatctgcaacttttcttctgttttcatgaatgtattaatcataaagtctattatattttataaatgcaatatgtcaatcaaatgaaggtctgcttttattccttccccttggtttctttatagccgcttttgtttttatagattgccttgtaccttgtaattttgaactggatgccagatattgtaacaaaaaattctagggattctggagggggttaagctttcttttagcagccagagtaatccttatggagtatgttgtctgtttcataaattatgtgattatttgtgtgtagctctgtttctctattctgttccattggattatttgcctgtaattgcaccagtatcacactcttactattttagctttataataggtcttgatatctagtagtaaaattcctctagcactttgttcttcaagattgtctttactattctgaccctttgcttttttgtatatattttaggatcacctttccaatactcaaaaaataacattactggggttttgcttggagtgcactggatctaaagatcggtttgaggagaattaagatgtttacaatattaagttttaaaatctatgaacatggtatatcaatttatttacttctataactttttagtattagcttttaaaagtatataaatcttcatgtgttagatttatttctagatactattttttgttgccttttgtaatttacttgctattcatttttttttttttttttgctggtaacatacttgatttttacatattgactttgttctaaaattttttgttgttgttaaaaaatagagatgagtttgctgtgttggccagactagtctccaactccaggcctcaagtgatccacccgcctctgcttcccaaagtgctgggaccacaacaagtgtgagccaccatgcctggcctaaatttatttgaattctaattacttgcctgtacattctgatagtatctgtgtagttacatacaggcatgttgtttgtaaatactgacagttttattcattccagttcttaagtttttttttatggttgtttgttttgttttgttttttgccctattgtatgggctagaacctttaatataatgtaaaataaaagttaggacattgggctttacataccaggagggcagttttaagtatttcaccatacagatgttcgtagttggctttttgtagctactcgttatgaaaataaggacattttctcctgttgctaattttatcattaatggatgctgaattttatcaaatgtattttctatgtttcttgagataacaatatggtaaattactttgattctttaaaaatattcaaatgccattgcattcctgcagcaaacccatttgtagaggatgtgtttaccttgttgtatattgctagattaaatttgataatattttattaaggtattttgttctgttacatgaggcaaaattctgtaattctttcttttcttttcttttttctttttttttgattaactctaccagggtgctgcggctcacacctgtaatcccagcactttgggaagctgaggtgggcggatcacgtgaggtcaggggtttgagatcagcctggccaacatggtgaaaccccatctctacaaaaaatacaaaaataagctgggtgtggtggcgggggcctgtaatcccagctactcggaaggttgaggcatgagaattgcttgaacccgggaggtggaggttgcagtgagttgagatcacgccactgcactccagcctgggcaagtgagactccgtctcaaaaaaaaaacaacaaaaaacattaacactaccttaaacctatgattttcttttcttgtaatgtcgacgtaaggatttggcttcagaattaggctggtctcatgaaacaactcccatttttgtatatcctataaaagtttatacactgttgttattggtttttgtgtgtgtgttttgtttttgtttttttgaaacagaatctcgctctcatccaggctggagtgcagtggccaatcctggctcattgcatcctggaactcccaggctcaggtgatcctctcgcctcagtctccccgagtagctggggctataggaatgcgccaccatgcctggctaatttttctgtattttttgtagagacagagtctcactatgttgcccaggctggtcttgaacttctgggatcaagctatccatctgccttggcttcccaaaatgatggactacaggctagtcagccactgtgcctggctcgtactgtttctaacttaaatgtttggaagagttcatcaacaaagccgtctgggcccaatatttttcttggacattttgtatggagattttaagatacgacctcaatttctttgaaagttcaaagactatccagattttctgtttctagttatatcattttagaaaatgtgattttcaaggaattgtcctttctaagttttcaagcttgttgtccctccgagttatcataatatcctgttatctttttattatcagtagatttggtggtgatgtcctctttttaattactgtaatttttaatttgtgggttttttcctcccttgatttctcttcttaagggtttatcaattttatattttatatttttgcctttgatttttttcctcttttctaagtctgctttctactttactgatttcttctctcttttttcctgtttaagattttcctttgcctgtaatttttctagcccttagagatgatggttgaggttactaatattaacctttccttattataagatatgcattttgagctttaaatttttctcttaatcattgccttaggtactgcacacattttgtatgtcattttccttatcagtcatttaaaaatagtttctaatttctattgtgatttgctcattgacccataaattggaaatacattccttttcaaacattattttctacttatttttctgtttctctagtgtggtcagagtacacattctgcataattgaaatttaagtcttgccttttgacctaatgttttctttttcttggtaaatttttcataatttacttggaaaaaaatgttaatcctgcagtttttgggttcagtatgtgtctgttagttcaggctgcttgaatatgttgttccagtattttatgtccttgttaatttttttgtctgctaattctatcatttattgagatatgtattaaaatagtcactaggattatagatttatttttctctctttttttaacctttgctttatatattttacagctatgttattcattgtatacaaatttaaaattgtaaaaacttcctggtcagttgaccttttcaccattctgagatatttttatctctagtaatgctacttgccttcaagtctcctttgttggatattagtattagtatggtcacaccagctaaatttgtttgttttgtctatctttaaaaaaaatcttcttaacttcagtcttttgggttcgaagtgtgtcttataaacagcatattgttgtggttttaatattcagtctagatatcttttccttttatttagagtattttaagccattatatgtagtaggattcctgatatatttaattttatcacctttctattagacgtacattgtatttattttttattcaaaaaattgtagtaaatataacaaaatttaccattttaataattttattttaagagactgtgtcttgctttgtcacccaggctggagtgcagtggtatggtcatagctcactgcaaccttgaactcctgagctcaagtgatcctgcctgagtctcctgagtagctgggactacaggtgcatgccattgggcctagctaattaaaaaaaaaaatttttttttttgtatagacagggactcactatgttgcccagggtggtctcgaactcctggcctcaagcggtcgtcctgccttggcctctcaaagtgctgggaaataggcatgagctaccatgaccagcccattttaatcatttttaagtatacagttcagtggcattgggtatattcacgttgttgatcaaccgtaattaccatccatctccaggcctttttttttttttttttttaaatcttgcaaaactgaaactctgttcattaaacaataactctctattcttccccttcctgatctggctgccagcattctattatactttttgtctctatgaatttgattactctaagtacctttaagtggaatcatagagtatttgtccttttgtgattgggttatttcacttaccataatgtctcaaggttcgtccacgttgtggcacatatcagaatttcttcctttttaaggctgaataatattccattgtattatagaatgtattatgcagtgtattatacgtttttgtttattttagcatccatggatacttgggttgcctctaccttatggtgattttgagtaatgctgctgtgaacatgggtgtttggtttaagtatctgcttttgattcttttttttttgtttttttttttttttgttgtttgttttgagatggagtttcactcttgttgcccaggctggagtgcaatggcacaatctcggctcactgcaacctctatctcctgggttcaagtgattctcctgcctcagcctcccaagtagctgagattacaggcatgcaccaccacccctggctaattttttgtgtttagtagagttggggtttcaccatgttggtcaggctggtctcgaactcctgacctcgggtgatccacccacctcggcctcccaaagtgctgggattacaggcgtgtgccactgcgcccggctgctttcgattcttctgggtatgctcagaggtggaatttctggatcatatggtaattctgtgtttaatttttaaggaactgccacactgctttctccggtgactgtaccattttacattcccggacaaattcacaagggttccagtccacatactgggcaacttttggcatttgcattggctgtttttgttttctgtaaggaccatcctcattactggagtgtcaaatggttccccattatagttctaattgatgtacttttatgttcttttttctctgctttttttttttccttcctttggatcaaacattttgtattgttatttcctcctattaacttgtttgtgatacattattttttactacttttatactgtacttatggtttagtactaaatataatatgtatttatagtatctttttttttttttttttttacaattccttttcactaagtaagtctctggtgtctctagagatcatagcattcattcatttatccagcccacctcttgcatgattgctcccatgcattttaattctacgtattttaaacaccacaacactgtatttaattgttctgtgtggtcaatattgatttatctttacccatctttttttttttttatcctgtacctttactcttcaattctttctgcatttatattactctgaagagtcctttttgttgttgttgctgtcttttttttaaccgatcacacttatttaataacaatatctagtttaataatttttttgataagacattttattaacaacatgtctagtttaataaaccgtatttcttttaatgaaagtctgctggtgcagaattctgtttctgttgaaaatgttattttttccttcatgttggaggatctatttgctgtgtatgtcactatagattttcagttattttttccagcatttcaagatactctgttatctttcactttctgtcattgatgttgaagttagctctagctctaagtcttgtcactcctttgaaggctgtgaatctcccctgtgcctcctccgcctacccccagctgcacataaagttttccctttttctttggttttcatcactgttaactatgttgtgccttgaaattttctttgtgcttctcttgcttgggattcttggagtttcttcagtctatcggctgatactttgatatcagttttagaaaatccagaattcaagatcttttcaatattgcttctgctgcattctctcttccctttctggatcttgcacttacactgtgtttcacatgtctcttattggtcttttctgtattttccatgttttatttttgaatctctgggctttaatttggtgttttcttttgacctgtcaagttcaaaaatcctgatttctgctgtttaatcttcttttaatgccatttattttaatttttggttcttcagttgtacaattttcattggtttcttcctgtagatttcagttctctagtgaaaattgctatttttaaaatatattccttttatcttttcctctatttccttgaacatattaatcattatgtttgttaacaccagtatctagattgcatgtgtgtttggttctgttttatatattttttcttttgacttttggtcatatgatcctgtttcttggcatcctagttatttttgactaaatcctgggattgtgtctttaaagattgtagatattcctgaaggtgataacttcctctggaaaaggcgcgtcctttcttctactgaagcagatgcagtgggagctggtcaccttactccgggcaggtgctgggtggagtgaaggccaggttgttgttttagtaagccatctgctgcttctggtttcttcaggctttcatctggaagcttgattttgctcactacaccatatttccttggaggcttctgaactaatttttgtttgatcctgagctctgcttttcagagttttagtttatctttttggccttcgcagctcagaatttgacagataccatgggagggaaagcagttgtatgcttaagacctctcttgtgctctcattttactaccatatagccttgtcagactgcgcaagttctgcttgtttctttctgctagccatggctgtctcctcagggcccaacataattctcagcctcttgcctgtgcctcctgttgtctgagaaaaaagtggcttcagatgatcagctcacttctccacagttctcccctctctgaatccttggtccctcttgtcctcactgctttggcagctcttgggtgcctttaaagagataatttttgtatttatctgtctgtctcttctactttctgagagttacaagctttttttgtcctacttggaggtattacgcaagtctagactgagttttgaatttacatagctacttgcagtgatttagtgtgatttgagatttttactacagtctcactgacagtggtggtttcttttgtttttgttttttgttttgtttttttttttttttttgagacggagttttgctctcgttgcccaggctggagtgcaatggcgtgaccttggctcactgcaacctctgctttccgggtttgattttcctgcctcagcctcctgagtagctgggattacaggcgcctgccacaacgcctggccaattttttgtatttttcgtagagatagggcttcaccatcttggccaggctgatctcaaactcctgatcttaggtgatccacctgtctcggcctcccaaagtgctgggattacaggtgtgagccaccacacccggccagtggtgtttaaaataaaaatgtacttctttaattaatgctaaataagattgctttaatttgacttttttgttacctgggagtatattttcctgtttttttttttttttcttctacttgtatttactcttcagtggactgtttgtttcctttgagcctttcacaggcacattctcctcctaacctgtgtggcaagtttgctactctaaagttttcttagttgcaaatcatacagatgcttaggaaattatgaaataatttactgtaagaagtcaggagggagtcaagggtaggagttttttgggtctctgtgttttgttttcttgtacatttatgttgtttcctgtaccagctgctttagatggttggttagcttgtgcagatcctatagtggtctttcttttaggaccagaatctgtaatcacctcaggctctgatgtccaaagtaaatgaggttggtccagttagcagcaggtatctatcctctccctttattgtggctacagacggagaaatgggattctttacccattctttatgggagaagggcagggtttctacgaggaaggcatgtgaatggagaagaaatgattgataatctctgataaaacagtgggcatgcaaggtggaattcaggcagtatttcagattcagaaatgtaggtcacaatttcttatctgcagttcggaagcctgaaaagcactgaaaacacagttattcttaagtttatggcatattcattgttgacaaaactggaacttatatgggtgaggcatttattacattttgaatattcatatgtttcattgcaaatgttatgtttactacatggccctacctcatggagctttcagccagaacagttagagttcctggatctctagttcaagtcacccccaaaaccctccaaacatgtaaacgtcttcattcttagaagtattactgaatgtatgtgtcaccactcttaaaatatttccaataggagaaaactgtaatagaatacttaagatagtgagtaatgattactgaaagaaaaaaagagcccagtttgtaggtaaagccaacaagggagggagatgtatagtgccagagcacgttagacatagtccgatatttgtgtaaaacgagactagattggcatacaggaaaaaatgcttagaagcctgtgtaggaggaatctggctaaaacataaaggtaaagattaaggagacttttgattccatcttagctaacattttaaataagaacatgtaagtgttttcagaagtggctccatataattggacttagctttcattagcagttttgctttgcagcatatttggaacataatttgtttaaaattgaaatggttttctttacttttatggtggttgatttatttatttatttatttatttttggggacagggtctctgtctgtctcccaggctggagtgcagtggtgtgatctcggctcactgcaacctccacctccttggttcaagcaattcaagctacctgagtagctggaattacaggcatgcaccaccacacctggctaatttttgtatttttggtagagacggggtttcaccatgttggctaggctggtctgaactcctggcatcatgtgatctactggcctgggcctcaaagtgctaagattacaggcgtgagccactctgctcaggctatggtggtttttatacagcaacactcagtttattacagtttatcccagtgcttattgcatttttttctgttaggaacctgtagtcaattcctcccttatttgcaaaggggtttacttaaaagatttgtaatttttgtaaattttgttgaaagtacactatttgtatactttggtaatgatatttatacatctacttgacaaatctatcttttaagaaattattttcagcttttaagtaactgtcacataacatgtatgtccagtatccattggcttcagctcccactgatactattttctttttgactcagcagctttaaaaccaaaatagtaagatctgtcttgaagccacagtctagcaggagaagcaaactatataaatttagacagctctgattagcacagttcccaaactgttatattatgcattaacccatacaggaagaatttaaaattgcagtatggtgagacaagttttagaagtgaagcatttttgagaaaagtatcaaagatgaagaagtactcttgaccttttaggctttctgttccagtctagttttagtgtggcattgtatttaacttgccttagaaactcataggtttatgccctcttgtggtctgtcaccaatataaatagcacaaatgaaaattttaagtactggagatcttactgcatgttactgctctcctttataaaataatttttaaaaagcagcttctgaggaacaacagctaagaaattattattcctgtcttccatataatgtgtggagcttaaaagttaccaaatgttattttaacccttggtaacaaaatgtatgtgtatgttaggtggacactaatgaacagaaaaatatttttggatgggctgtccatcattgtccttctaggtgtctaaccctattaatttataagtgtcttaaaaatatgatgaggtgtgatagtaattgtagggctagcacattacccttctaccttcacctaaacatacacagatatactagtaaatgatgcttgggaaatgtgtttatacttgtttcatctgaaagggtcaggagctgtaggaggcattggaagaaataaggattataatgttagtgaattggtgaacttaagcttacagaatttgcttttactgacatgattggcaaggtcttatttgtgagtgtgggactgaggaactaactagtggaggagaaacagcaatagcagtcagtgttttaagactgcagctgtaaccagtgtttttctgctgttatccagtaagccgcatgatggttggaagcaggccagtatagggactgtgcactttaggattagatagaatccctgatagaaagacttggttttaaaactggtctcatctcttaccagttcctggacagttgtgtaatattaagtaagttacttcatctctgaatacaggtttcctctccaaataaagatttaaaccgcctccattgaactctttgcagttcgttttgtcacatgcagtgttggcatatactcctgttgttattgctcataggttaaagacagttttgtgttgcaaagaatggataccatatgactttgtagccactgggttgttggtaaagactcctaaatagtggtaaatcagctcatagttctttttctttactgtggacttactgctgtacttctatgtaggtacatactttattataaattcttgagtgtaaacgaggtcattatgttaaagaatttactagttcaggtattttaaagttgaagcctagtaactatttttaagaaaaatgaaaataatacaataagttttttttctttaggggcactatttgcatgttttggcaggtttaaaaaataaacaaaaactagttttgttcttccattgtggtcttacttttgtggaggacaacaaagtaatgaaatgtttttgtttcttttgctgtgtttttcaagtgttgcttgtagaacaaggctcgctgccttatggttacttttaaaatttaatacttaaagtaattaatctgagtcccctttcaggagaaataagattatttagaataatttaacttaagggaaaaatatttgtttttataacaccttctaaaatttctaagttgtagaaatttactaattttttcttttttttttttttttttttttttgagatggagtctccttctgttgtccaggctggagtgcagtggcgcgatctcggctcactgcaagctctgcctcccaggttcatgccattctcctacctcagcctcccgagtagccaggactacaggcacctgccaccatgcccggccatttttttgtatttttagtagagatggggtttcactgtgttagccaggatggtctcgatctcctgacctcgtgatccacccacctcagcctcccaaagtgctgggattacaggcgtgagccaccgcgtctgaccaaaatttactaattttttcttttgaataacttgctgtgaaatagaagacaactaaaaaaaaaaccctctaaatataatagaactgcttgggcttaaatcttttctgcaagtaggtggaccataaatcatataaacaaagataacctagacatgccatcagaaggctagtctatatatttttatatctacctctttcatctttccccttatttctgatttcccaaatgtcacttctttagtttacatttggatagtgcttatttgaagtctctgatattctacacactatatgtaactaataaagactttaaaatgtaaggcagcattttggtagtgaaaatttctcttgtacattgtgaaatggattttgttgttcgtctatcttcctagggagactgtttaagggaagtaaaaggaacagggcaagaatggccggaacgaagtggagggtagactatggggagtgatggcaagaacacatgccattctaccagtgacttgtttcttaaacataaaaagcatatgtgccaaatttgcatatttactaattaaaaaggcttcctggaaacattaggtagactatcttctataacctttaacaccgtcactaatggatatagcttagaagatttcctcgaaggtcctttaaataatgtaaatgattatgaatgtgtaactagttaatatgcagctacgaaaggattatcatgtagaggttaatgaacattctgctcttatggtttgcagggctttgctttctgtgcttttggctctcttcatgcttggaaacacatgcattgggattggaaaacatcctgactgttcttgggtctcatcttttaatggggttgttaaataggaactttatgaaaaggatttcatgagcatttttttcctttttcaatttacatttaattctatttgtctattttgtaattactgccaaatcagaaacagtgaaatggattgatgtagttttagcttggctcttccagatgtaaagtcagtactctattatatattgccactgttattaagtgttgctatgtgattgatacttactgagagatcttcattctaaaatggactttttatgctgagttaatgtgtagtatggttgggtttctgattatagcatgtattttggtacagaatttctgtcttagtatttaaaatgtcccaaaagaggacatttatttcaggaattaaatgttacaatagaggaatttagtgacaggtctaaaaaaaatcgtgtgtattttttttttttttttttttttttttttgctgggacgggatggtgaaacattgagcatatacaagagacaatattggtatttagagcagtgaactagagcagcgttttgcaaaccagataatgctgctctctttttctcatggcctagtcttaagcattttggctttcatcccctagtttctctgtctctaaaatggtatatggtattctagactgctgtttaaaatttttattaataggtaatttaaaagtagataattagcaatccttgaaaacagtgttaattcttaaattgtcattcaaaaatagtgttatttttttaaattgcatttttctttattgtctagtcttcttattttctgagcattttgagaatctactgacatatctccaaggaaaacaaataacttttgtacttaaattcattgttttagtattataaacatagtttaaactggctgtgaagtgcttacagtcttgatcataattcactggggaacaaatgagctgttcagagcatctccttatcccaagtatttcttcttgaaaatgtagtagaaaaatatcactgaattcattttttaatgcgtcagaataaaaattacaggtgaaaatgtttggagatatactgacaaaataaaatattgtcactacagtcattttttttaactgacgaaacgtggatgttacattggtttcttgttatttataacatttatgtattctacaaaatatgtaatattgaaaacaggtctgtagattgtacaaaatactagttatcttatatcatatgtcacctaatagttatgaagcgggttttgtaccaaagtatgaatcagaaagctgtaatttgttctgcagttatcagcctgcattagagggttatgataaagtgtgctgcttaaaaactaacgttcacatctctgtgcatttgacaaataaaaatgtatactgagatgctattaaatctgtaaagccaatgttctagttttcagatacactgatttttgtagctctgtgcatagctctgttttttcatgagtagttatctgttttcatgacaggtggtcactaactgccaagagagaatccagcattggtgagtgaaagatggttttattacacttctgaaatactgatggggtaacctacttgtgttcaaataatgtgtttactgtttgcgtgtgtgtgtatgtatgactagtaattgaattcttctagtagtctccattttgaatgcctttaatactaatttatattgtctttgacccttttctgaattacacatttctgatttcctgacgttgtgttaccacttgtatttattctaagtgccttttcttttctaagaataatattaatatcattatgaattggagactgagacatttttgaatgtgacttagctctattttggggatatttcttacattttagtagaaaaataatgggaatcagttactttaaaataatgatggaaatagggcacagaaatgttttcccaaagtttgaaaaaaaaatctaattttctacttttcagagcttgttttattgactgtactttttttttttttaagagagagcatatctattttaatgtgctaatctatagttaataggaccatgtttggtaaataacacactttcctttggcttctgaggaaaatgctcgatttaatggtgaataaaatcttatattatgagttgtcatgaagtatagctgttgatcttacagatatcaaattacaatatatccatgctgtgcttacgaaggttttactgagagaacaacaggagctgtcttgattattgtctgcagggttattgcaaaaatcatggtaactgcccctttagtggtgagattaaaccttcggttatacaccatcaagcatataatattttaaatttattttaagaggctttttcttcatgcctgagagatctccaaggaaataatttatagttagtgtatatcaaatgttttttggtttaaatgcacataggctgcaggcagtggataagagtgaaaattggtgcaatctgtacacatcatcttattaaattttgactattggcttgcagaaaataatctaaaactaataatatccactttataagtaaaaattcaggacttcattaattttcaataaatgcatcgttgtagttgcttccactggtggtgtaagtgtgttagcatttccataatggaccattcgcctttcattatacattcagttcaggttaaaacttgaaatacaagtcgttggccaaagaattttttcccctgcacatttagtcagagtggcccattttacaaataatttccagaggaagtttattaacgtggacttctgtctattggttttggtaagaagttcaggaaattagaaaggtattcactggaaatagatgctagtttacataaatgggtgaatggtaacttgcttctggtttgttttataagattcttattagagttctttaaggataagggcacgttttcatccttttattcacagcccctactgctatgtttggcacaaaataggcacttgataaatgtttgagtaaatgaccaaatatgtggttattttctatataacattttagtttacaaatactctagtagtgcacaagtctagtgagcagtgacagaaatgtgacatttacttcatggcaggttcatgtgaccctcaatttcacttttcagttttgtaaaaccctctaaactgtagaagcttagcatatttgcctacacatatcttgaagtaatatagtactttatacatttaaaaaattatttttttccagttaaaatttgcattttcctctgaatcatttctggtttggttcaggaaacagacttttctctttgcttttaatgaagatctatacatggtatattgctcaaatctgaatggccagtaaattaatcaattcattatatcaaaaaattgaaaccaaagtgtcaccatttccctgaaagcaaggaaattgctgtttgggagagtcgtggaattcttgtgatatttttgcattctcttaattcctcaaacaatagttgagtttctaccatatgccagtattgtgctgctgtttggaattgaaagaccctgccatagaagaattcatagccagacatataacagggaaatcacgataattttgtgctatttgcggagatatgaagcaactacaggagttcagaggctggagccgttcttagggtgtctcacacactacttttaaaagcatgttgctttaattcctacttaacccttggtattagcctagtctaaaatataatttctgttaagcccctattctttatgagtacgcaccagtatagtaaagaagaacaaaatatatggtttgaaaaatgcattcttatgctggtgatgtttatgcttgtttgtataatttttaagggattctttaaggaacaagtatatgtattctaggctcagaaataatctaaattggtttttgtttaaaaaaaaatgtaggacagggagtaaaaatatttatagaaaaataggagtgaaaatggtctgggaccacaggatctacccaaaaaaatctttgagaaaattaatttaaatcctagaactttggtgaacgaagaaatttataatatttgtttagttaataacagataaaaaggaaagattcaagcctattggatgagaatttgtacattattttagagctaataataatggttttcagtttagtgaggatttaaaaaatgtttttgaatcaaactttttttctttataatcctttttaactaactcaggaaataaggtattatgaaatccacacactgttacctccttaaagtatgaggatacttcccactgtttggtccactagtggctgattattttgtttgtggattatttgtaattttctttttaattcttccttaaagagcatggcatttggagtcacagacctatatttgaatcctgtcatttactagcgttttgaccttgaacaattatgctcagagtctcagttttttcttgtaaagtgatgatgatactacttaactcacagggttgtagtgaagatcaaatgagatcatgtctgtagaacaccctgcccggcactcaataagtattaataggaacccatatacctcttttgaaaattttaattgtcagacaaataaaaaaaaaagccagtgctttgtaaatattcgtgaatatttagtgttcattctgtttttttgtcatgatggagagagagttgggtttctgtgaattactgttacagctttacattaatatttttaaatcactttttggtatgaagaatttcaaatgaaaggtgatagagtagtatagtgaatcctcatgtactcatcagtcggctttgataatcatcaactcatgattttctctaaactgttcatttcaacatcttatcttgccatctactcctacctccaatttttttttaacttttattttagatttgggaggtacatgtagaggtttgttgcaaaggtgcattgcatgatgctgagatttgaggtacaattgaacccatcacccagatagcatagtacccagtaggcagttattcagcccttgcccctgccctttctcaccgctcttgtattccccagtgtttatttgttcccatctttatgtccatgtgtccccagtggttagctcccacttataagtgagaatatacagtatttggttttctgtttctgcattagttcgcttaggatagtggcctcctgctgcatccatgttactgcaaatatttcttcttttttatgggtgtgtagtagtccatagtatatatgtatcacatttttgttatccagttcactgttgatgggcacttggattgattccatggctttgctattgtgatcattgtggtagtgaacatacaggtgcatgtatctttttggcagaatgctttttttttttgggtggtctgtattcagtaatggattgctgggttgaatggttgttcagtttagttctttcagaaatctccaaactgctgtccacagtggctggacattcccactaacagtgtaaaagcattccttttctttgcagtcctgccaacatctgttcttttttgactttttaataaaaactattttgcctatcccatctccagttttgaaatgaatctaagccgtatcattccatctggaaatatttcagtatatatctttaagagacaagaaagactatatattaactttttaagatttaaataaaaaatatttaatgagacaatacatttacatgtttcaaaatttaggaggtatgaaaggatgtaaatgatgtataggttcctcctaactttgtcccctaattctcagttctgtttactttttttttttttttttttttgagatggagtctcactctgtcatccaggctagagtgcaatggcatggtttcggctcactgcaacttctgcctcgcgggttcaagctattctcctgactcagcctccgaagtagctgagattacaggcgcgtgccgccatgcccagctaatttttttagtattttagtaaagacggggtttcaccgtgttgcccaggctggtctcgaactcctgagctcaggcaatgcaccctcctccgcctcctaaagtgctaggattacaggtgtgagccaccgcacccggcccctcagttctgttttctggaaacagcagttttttaccaatttctcataaatcttttcagaaatggtttgcataatgtaagtgtttgtgtatgtatgtgtgtgtgttgtgtgtgtgtattcatctacatgtttatatacggctcccatccttttggacaaaaatgaaatcagattgtacctgttcatttaatactatacctaccctgtatcattaactaacagttcctctttacctcattccatacattttgctgtatgtcagacatttaacttttaggattactaaatgagacctggaactatttttttttaaataaataattgctacatgactgagagtatagctctgaactcaaaatatatccttgctaagatgatatatctgttattttactgctccttagtaaaattactgcaaaacttagtggcttgaaacaaccaccatttacttgcacatgattcagtgggtgtgcatattaagctgggctcacctgtgtggttcttctgctagtcttgtgtgggctcactgctttggttgcagccagttggtggctgggtcagctttgttgtccagaatgacctcaccctcaagtctggtggttagtgctgttggttgagcctctgcctccatgtgctcttttgtccagcttactttctatgggcatctcagcagcaagaatggaagctgcaaggccacgttatgttggtcaaaggaagggccagcgcagattcacaaggtgggaagataacacccacctgttgagaggaggcgtgaaaaagaattaatggtcatttttaatgcactgcaatgactttattgaataggtcctacacacacaaaaaggaagtctccgtcctttatgttgactggtgagaatgaaatgaaatagtacatgtgatgcctggcagttcatctttatgttaggcattacttacaatcgtaaatcgtatgcatgtgagttgtaaaaaatttattgccttgcttcctttattttaaaaggatttttggtaaaggtatctttgaaattacatgaaacagacttaaatatagaagaagatactttgttcaggtgtttaattttggaaagaatactttaaatttagacataaaagttctaaaacactttggcatgtgagttttgagagagtctaaagcaaatactcaacatttttttatttttcaaaggaaactggacaaaaataattgttcagaggaaaagagtaactagcttccattagaatttatagttaaagtatatagtaggaaataaccaagaaagcatacctgtatagctaaaaatctcaggtgaagatttgattttctctctctcttttttttttttcctgttggagctactctttcctatcagtcgggatggagatacctgctttatgcacacattgtatatctgtctatatgtctcatgtttttgaggcattccttgtgcacagaagcactgaactatatcattgtaacaatgccatggtttacagtatatttcatatgaatacctgaaactgttttcttgagttgccttcacatgctatataaaatttattttattatgtataatatgtgaaatattgatctgcatacctttaaaacttgtaaaagccaatgacttttttctacagtgttaggtagatttgtaaactgtgtttttcagagtctgtattttactgactacaaagttttcagtcactgttttgtagagggccttctgtttgggctttttctttatgttattttttctttttttttttttttttccctcctcttgagcagagagcaactgccaaactttctggaaattttgcatgtttttgttgttggagtttctgtagttgtttatgaaagtcttagggataagggggaagaatcatatatgtcaaatcttgtcattaagtttctgcacagttttaaaaaatggtgtgagttagtacatgcgctagtgattaagtgagtttggaactcgtgtgtaatgtttcaaagcaaattaagaggcaaaaaaaaagattcaagttgaatgtttaaagaattttttttaaatctgagttaggtttttaaatgtttattctgaatataaaatgaatgcatgcttagttatggaaaagttgaaataagaaaggaataaagataaatttactcataattgtaaagagaagctaattctctccctgtttttaaaacattcccttttattccctctagcttcttaattctgtatgtgtatttatgtgactaaggtcaaactgtaaatgcatttttcttttccttctctttttaaagagttaaatgatttttaacttgtaattagaatttattacttgtaggagtcctcaagcttttatatcatgtttttggaagcaaccagctagtttaacgcacttctgaaaatgaaaggaaaacttacatgttataggagagtttttttcccctgaagagttttaaactattattaaaaaaaatccctaatcacatttcatcacctagaatagtccttgatgacgacgtgtttccagtgtcaatatggtttggttcagtttcccatgaccagctcaagtccagtatctgactgaggcaaagggcttagggcttactgctttgggcacacctcatgattttttatctttgtctcaactgtattaggtttgaaaactgtacttctttgtacttttttttcattttccatttttttttatgaagagtaacatccaataaaactcttaagcacagagtcctgtttgaggatgaagatgtgaatattgcaacaaccacagtgcttgtctgagaagtgcatcacttggtgataatcctgagtgcttgttcttattttgagaaatataagtccagattccactataccaaagacagattggggtgggtatcagtgtaagacctgagagaaatgtaggctgtgaaaaatggaggcatgcctataatttactttttactaattcatattgaactcatgatcaaattggtgagggttttcacatttttcttttatttttaagtcagttgataattttgaggtttttaaatatttggtaggttcaaaaccaggattgccatttttcactgttgtaaaacctcttgagaaactttaacccggaggtatctatgattgggcctctgctgaaactatatgtaaaatatgagttcttttctcagggaagagcctagagtttttctagtttctcatagggatcagtgacctaaaagggttttttaattgctactgtaattaagaaaacccacaaaattacttttttctaaaatatgctttagaaagaaaatatagaaagtgtaaagtagcaaaacctatgaattacggtaagatttaagtagaaatttgcacaaactttcaaagcttaagtcagctataaactcatcacaccttttctaaaaggtcctttcctttgatttgtaataggaatttatattagttatagaaaatttggaaaataaaaagaacaaaaattacatataaactcatcagtaaaaattaactaggcactttaggatatttctttcaaacgtagatgaatgtgtttttacataattttaaaggttttttgctttgaattcacatctcattttcttagagcaaaagattagtaatgagtgaagaaacaggcacctgtgataactgacaagtcttcaaacacatgtgtatggttgttgtagagagaacagtagaacagatttttctgtccaggcttactatatatatatatccattgcactgttttctcattgttgaaaagttaaattgaagaaatctagtagaatgttagctgcatctctctttagataattttgtttcattgacttgaaaaattatgtttttatatgcgggttaatcttggtatctatgtctaatagtaaagttttctgatggactcataaaatataaagaacatagattatttcatcagcatcttctgatgacataaattccttggtataatagagttataaaaaaggaatataccaccattctgcctgaattttgtggtacatttcagttacttatatcaattgaaattactgaatattttgccatgaccatttagaaaaaaagtgtaatgctattgatttaattcaagtacatttaaattttccatgaggagtgttccttttcccaccaaattgcataaagcataacagtatagatccctttttcaagaatttttaaataaaatgtaacttttatcaatttgtttagattgtttaaaaggatactttgaaaaaaatcattatttcttgctttagtaactggaggacatctctttatctatatagaatccatgcccaaacttaatattcctctattttcttgattttagaggtgaaaagccaggcatccttcaagctagtggatctttgacaaagatgcattgcaaaacaatcaacaaacaatcagaaaggcatgctatgtgtgagtgatgatccctgcagcatatgccataggcttgttgtagaggagctgctcagtaaatggtggattcaattgaaacaagtcttttttggatgcttaatgggaagttgtagggtgggtatgatggactaaaaattatttctaaagaaggttatatattgtatatattccagaatcttccgtttttatcgtttcttaaattaaaaaataaaaatttaactctgtcccaggttaactcagatgttaacacttatatagaaatttttttcctctttccccgttaggcatctcacagtattttctgcttgtctgtttaggatgttaggtagaggaaaagagagtgatagaagattttttttcttaaaaaaaaaaaaaaaaaaaaaaaaaaactgggccaggcatggtggctcacacctgtaatcccagcactctgggaggccgaagcgggtagatcacaaggtcagggttcgagaccagcctgaccaacatggtgaaaccccgtctctactaaaaatacaaaaattagccgggtgcggtggcgcgtgcctataatctcagctactcaggaggctgaggcaggagaatcgcttgaacctgggaggtggaggttgcagtgagccgagatcacgccacggcactccaggctgggtgaaagagtgagactccatctccaaaaaaaaaaaaaaaaaaaaaagttcaatgttagtatttgctgtctattttaacttcttactttaaagtaaaattagcaaagtcttattgtttcaacctgatttaaattttatctcccttttttattatttaaaggttggagtctttatcactggcctcaaaggatgtagactttttttttttaatagagatttttatttttgtcagtcacttttaagaggattaaaaatgttgatccctttcatatttcctcgtccctttaaaaatattctattatgacaaatttcaaacatatggaagagtgaatcttgatcacctatctgtctgtaccctaatccgttaatccatttttttctgatgaatttcaaattaagttgtggacatctgtgtatttcacccctaaatacttgagcatatccctcatttaacttgatttctctcttactttctacaattttatgcaaatgagctgtttcccataggttctgtcttgatcttaatcctttaagggtaagggctaacttgtggttgtgttaatggtcttcatcgctgctgcctattttttttttttaatttccttaaaacaaaaggtactctcaaaaggcatattgcacatgattagcaagattcagaaggaagtggttaaagtttcttacatgccttatacctatgcttttagttcttgttttgtataaggaatgttgcatgaggatattggaaaaaaatttaaaattaagagttgaaggcggaacctgatctataaggatccattatgttgaagccaaagaagcaggtctagctattctaagtaagtaggctggagaggtgtttcttaactctatctgggttttgttttccatttgaagaaaaattattttaagcaattaccatttttgattactgtaatgactcctgtgtccaaaaattaattacgtttctaattattaaaatagaaaaaaaaatctgttcaaattttgttataaataaagaccccagacttaacctcagtaatgcattagttcttagcataacttttgcattttctgttgcataggctttgtgatctttaacaggattatttaagcctgaaataatagagatactatttggagatcactgtttgactaagccctgaacatttccacgaatgtagcctttagagagagagggttcctcaagctgtagtttcttccagagacattgcttgactcctcctggcctcccttcataaaggatttctacatgggctgcattttaagtgatcttctacttttgtatttttagaaaataattcaaaatttataaatagcaactctaatcttaaactgctctccagtatgtccgcatttttattccagagagaattattaataagttgaaaactgattatatttgacttgaaatattgacattgatctctggtattgcctgtttttgaacgtactgttcttttaatgtacaaaatagatgttttttgtgaggaagttgtttttttttctcctaagcattgttaccaaaataagacttattgaatggtgactttaatactagcttcttaatattcatagaaatatttagatatctaggctggtgtatttagtccttgagcatttgcagaattacttatctgaaacataaataagctgttagtgttatgttattaatagtgagtgttgactgtctaggcactgtaccagtcagtcctatggagacattctcccattgattgctcacaccagtcctgtttccaaagcccctgaatggttacattcagctgtactgtctttcagcaagttatactatttgtatcaaattggttagtgaaatcttgtaggtaatagtctttcttgaaagttttggaattgatgttttttgatgcttcatgaaaaaaatgagttttgagttttggaaccaaaatagtagttgctccatgctgggcagtgtgttagaccttttatatttaattctgttgaacctgtgagataagtattagtccaattttgccattgaagttactaagactaaggtgaatttgtgtaaattgcatgtagagcttgggattcactctctggtctgacttcaaagccatgttctttctggtacatagccttgtgcatgaagtttttttgccattttatccatataaaaattttccaggaggaggatttttgccttaaacaaaagaataaaacatgtttcgtatttatttatagaaaaggattttttttggggaaagttataaagcagttgcacactagaaaatgagaaagctttcatgaaggaatgcaggtcagaagacctagctaggttaaactcattgcttacctcatcttgatagaggagatctggcttcttgctatgtggtttttccatcttccttctactttgtcttctgtaagagaaaaatactgataagtgacatttattataggttatgtaaaataatatatatgtgaaattccttaagatcttaagactgagctaatttttttttattaattatgctactgttgcttcagggaactaagcagtaagctgaaaccaattctgtgatgtttgtcatttatattatctggagagttgttacctacattgcagtttatcctgatttcaatttgacaatgtctacatgttcttttaaattacttgctgagttggtgaatttttgtttctgttatttttaaaaactgacaacatccttctgcttaaaaaaaattcagtgctgtagttttgcttgcagcctgtatcttagcagggaaccctttggaaacccagtctccagagaaagtttgacgggcatcttggcataggctgctgcctggtattactcaaaaagaagggctgttcatttccagcaggtgttaagagctgagtaaggcccatagcatggaaatacgatcatctctgcccctacagagttacatataccttttggttgtttgaaattacttatttggtagctctgtttgatgtaacaagaaacagactcctaggccaaattgaaacgccttttgtattatctctacttaatttcttctacccccagttgattctctcttaccttaatcacattattatgaataattgaagagctgatgatgcatttttcagcctaaggttttctgatgaggactaaagcatctgatcaaatttcatgttcatgatttcaacttcacagccagtatctattcactcaaaagctttattaaatctcttctttcggccgggtgtggtggctcatgcctgtaatcccagcactttgggaggctgcggtggggggatcgcttgaagccaggagttcgagaccagcctggccaacgtggcgaagaaacctaatctctatggaagatacaaaaattagctgggcgtggtgtcatgcgtctgtagtctcagctactcaggaggctaaggcaggggaatcacttgaacccaggaggtggaggttgcagtgagctgagattgtgccactgcactccagcctgggcaacagagagagactctgtcttaaaataaataaatctcttcttttttcatcttgagtcccttcttctctccaaatatcaggccctcttttactgtctcccttaattttcacattttatttggtccagatagtcttgtatcttaaaaaacagtaattctcaaaatttgagtattctgcttctaaatgccagagtccctgaagagtcttaattcttcaataaatgtatggtagaataatgccattgctaaactgtataaaaacaggattttaaaactaaaaataaaaccacattaatcttgaatttgctaaaattatgtttttgattagcttgttttatgatacctggcctactgggcctcccaaattgctgggattacaggcgtgagccaccacacacgactgaaagaagagatttaataaagcttttgagtgaggccaggtgcagtggctcacgcctgtaactctagcacttcaggaggctgaagtgggaggatcatgaggtcaggagttcaagaccagcctgaccaacatggtgaaacctcctctctactgaaaatacaaaaactagccttgcatggtggcgcacacttgtaatcccagctactcaggaggctgaggcaggagaattgcttgaacccgggaggtggagggtgcagtgagccgagatcacgccactgcactttagcctgggcgacggagcgacactctgtctcaaaaaaaaaaaaaaaaaaaaaaaaaaaaaaaaaaaaaaaaaaaaaaaaaaaaaaaaaagaaaaatcgttaataatgtgtgtatttggtgttttctgtcaacaggaagaaggtagataatgactataatgcccttcgagaaagactcagcaccttgcctgataaattgtcttataatataatggtatgtttggtgtgtttcttttaaagtaatagttgtttcttgtaaacatattaactatgtgtcggttcacagaatgtcaggctgatggactgtgtccaaggtaactatgtagcaaggaagatttgttttgttttactttataagaacacagtaattgtagtaattgttggtatttacctttttttttcagaatatatatggtgacacaaatgacataaatattagcacaaaattggacatatttcaaatggaaacttactatataaaaaatgtaattatgacagaaatatggtactaagtcgtttcttgttagccagagcaggaataggccataatgttttgtaattcacagaattaaaccttaggacattgatttttatataaaaacgtgctgctaatttttgttttaatgatcttcacatcgacatagtgatctgttcatgagccctggattagagcctttcattgcatgaatgttctttcttatgaagactttgttcttttatactagtccaagtattttgtatatatagctagatagatccattaaagctatttgtttactaattcctgctttgcaaaagtgtctactttattgaaaataatttttagttttctttatcaaaagtattttgcattgacaatgtttcactactagttgctttcacttagatttgcaagtgaatgaaaagtataaacatgccgagacagtactactttctttaagagctatatgtaaatatggtgtggatttattttcctgttttaacattgatttatgaacataaagcaattttctttagattttcctagtaaaattttaatatagtgttgaatttctgtgaagctggcattttatttttcccaatgtataaataaaaaaattcagttatgtaaggcttttaatgcgaagtgttttataaaatgtacttttcagtgttttatgttttttcccttttttctttttttttaaacaataggtaccatttggcccttttgccttcatgccaggaaaacttgtccatactaatgaagtcactgttttactgggggacaactggtttgcaaagtgctcagcaaagcaggctgtaggtttagttgagcaccggaaagaacgtaggtacccattttaaatgatgtttctttgttgtatatgtatccattcacagattgccaagctgaagggctgtttcttaccaaaagtaccttccgtgatctatgaatccaggctgtttgtgattctgttgaattgtaggtagtttgagtagaaccaacatttgagaatgagctggagaatggagcatccgggttggaaatgtcacctacattggcatgttttcagaagttacaaagtttcaaagtcattatgtgattttgtagttagaagttgggaagacataaaaattggagtcattttataccttataatttttttttagttgctattatagacttatttttgcacttaatactttagtacacagaaataatgtgttttctccttagtgaactaagagaaatacctgtttacataagtagacaattcttaaaaatgctttttggtttggaaaaaaaaccatattttcatttgatagaggagaccaggtgtgaaaaggtgctacctaaaacagcacccttatcctttttcagttgtttgagttctctgcatccctttattagggcagctcttgagttttgtttatccgtgctattatctgtaggtgtatagaagcctacatacacacacacaacacacactacacattttgcagttggatgagctagcttgggttctagcttagttatattttaaaattaggttcagtttataatctgttgttatttctgtaatacgtatttagattgagagtataatatccgccctacctgctttttaaccttttagttaaatgtgtatttgaaaataaatgatgggaagatccttttttataaataaggtcatactaaacagaaaacagctgagttttctaaagctgaacttgatttcacttatacatgaatgagtactagagaactcatttactcagtgaaattctgggaactatatttggagactctaattgcaaatcaactcctataagtttataattgatatatattttgatcttttgtgacactaatcagaatcttattgttaggcctgtatgtaatttctggcaatgataaatcttttggctttgctgcattatttttgtcatgtatattagcgaaagagaatgggcatacttttttcttaaagaccttactgaagacgaagcctctctttatatactgaagtagctctgatgttatgaaatgaatccatagcctgttgaagtttgttcacattgattttcatatttcagtgaaaaaaatctttataattagttataacttaaaatattaatgggaatacttatactacaatagaatagagctctagagtagagaaacatgtttttgtaaatcactttctagtagttaaatatggttttggaaagtgaccaaacatagatgacttttgggatcaatatttatctaaaataattttcaaagtacatatttcctgttacaataaattctgggccgggcgcaggggctcatgcctgtaatcccagcactttgggaggacaaggcaggtggatcacctgaggtcaggagtccgagaccagcccgaccaacgtggtaaaacctcgtctctactaaaaatacaaaaattagccgggcgtggtggtgtgtgcctgtagtcccagctacttgggaggctgagacaggagaatcacttgaacccaggaggtggaggttgcagtgagctgagattgtgccactgcactccagcctgggcaacaaagcgaaattttgtctcaaaaaaaaaaaaaaaattacgtaaagctcttttattcacatggttttataatttatacctgaagaaaatacttaggtatattgttgtacttcacatttattaagaaaaggtactttatttttcttaaggcagaggaaatataaccagttaaacacatagtcatctatgtcatggttgattggggtaattggggaaggtctgagttacaacacgggtcatgatttgtttagccagcaccacagtcaggacacggaataggatacaagatactgctctcaggactcagctcctatcaaaacctccctcacactgccccttggtggtcacaccctacggctgcctactgctgaaggattgacgacttcacgtctgtgtcttttgagattagcttcttcacttgctgtaacgcctcatccaggtggttctgtgtattcaaagttcatttcttttattgctgaggagtgttccgttacatgcatatctattaaatgcacgtacagcagtttttccattcaccttttgagggacatttgggtgcttccattttttggcggttaggaacagagctgctgtaagcctttgtgtacaggtttttgtgcgaacatacatttttattgctgttggtaaatacctacaagtgagattgttagatcatatgataaatgtatgttcaatttttaagagactaccaagctgttttccaaagtggctgtatgatttacatctctttcagcagtgtgtgatagtggtatctttgcgtctctaccagccctcaatattgtcagtttaagaagtgtagccatttgaataggtgtatagtgattttagtttgcatcattgcctaatgatgttgagcattgattcatgcacttattttatctttgtgtcctcttttacctgttgaactcttttgcccattttaaaatattgggttatatatgcttttttttttttattttttgagatggagtctcactctgtcgcctaggctggagtgcagtggggcgatcttggctcactgcaaccttagcctccgaggttcgagcaattctcctgcctcagcctcctgagtagctgggattacagacatgcgccaccatgcccggctaatttttttgtacttttagtagagatggggtttcaccatgttggtcaggctggtcttgaactcctgacctcaggtgatccacccgcctcagcctctgaaagtgctgcgattacaggcgtgtgccattgcacctggcctgggttatatattttctttctttttttttgagatggagtctcactctgtcgcccaggctggagtgcagtggcgcgatgtcagttcatcgcaacctccgcctcccgggttcaagtgattctcctgctcagcctcctgagtagctgagattacaggtgcgtaccaccacgcccggctaatttttgtatttttagtagagacagggtttcaccatgttggtcaggctggtcttgaactcctgacctcatgatctgtccgccttgtggtccacccaccttggcctcccaaagtgctgagattacaggtatgagccaccgcaccccgctgcattgtatattttcttactgtcgttttgagagtttttttttttttaatatattctggatttatgttaaataggtgatgtgcaaatattttctcccactttgcatcttgtcttttcattctcttaacagtgtctttccagagcaagtttttaattatgaagttcagcttttagctttttttaatggatcatatgtgtggtgtcatatctaagaacgctttacctaaccttagttgttgaagattttcttctgtgttttcttctgaaagttttatactttgatattttacaattagatctgtgattgattttaagttaatttttgtttgaggtgtggggtttaggtcacggttcatttttcttgcatatggatgtccagttgctccaatactatgttgaaaatactgttctgtctccattgaaatgactttgcacctttgtcaaaatgaattggcaacaagaccatcttagataccacactaggatggttataataaaaaagacagtaacacttgttggtgaggatgtgaaaaaattggaaccctcattcattgctggtgggactgtaaactggggaagccactttggagaacagtttggaatttttcagcaagttaaacattgtgttttactgtgatctagcagttccacacctagatagtattctacccaagggaaataaaaatgtatgtccacaaatacttgtacatgaatattaagagcagcactgcttatagtagccgaaacatggaaacaacctaaatgtctatcaactaataacaggtgaataagtgtcgtacatccatgcagtggaatgttgtttggcaataaaaagatgtgtaccttgaaaacattagaataaattaaagaaaccagtcacaaaagaccatatattgtatgattccatttacatgaaatattcagaaaaggtaaatttataaaagaaaggagagtagtggctgcttagggccaggaaggtgtgagagagaatggagagtgactgctaaagagtatggagatttttaggggcaatgaaaatacaaaaatacagattttggtaatggttgcacaaccctttgaatatacgaaaaccatcaaattgtacattttaaatgggtgaattgtatgttatgtgaattataacttaaattgttaaaaaacaaatgaatgagccattttgtgtaattgtgtttttggaccatctgttctgtttctttatctatgtgtctgtctctttgctgatgccactctgttttgattactgtagcattatagtgttccttacagtgttccttaaagttggtagtacgggtgctctaagtttattctttccaaattgttttggctgttctacctcctttgcctttccatatacattttagaaaccactcgcttatgtttacaaaaactcctagtgggattttgattggaatcgcactaaatcaacacattaatttggggagaattgacctcttaactattaaatcttccagtgtgtaaatacttacagcctgtaaatacagtgtatctctgtatttaggacttctttaatcagttttgtagtttttgagcatacaggtcatatgcgttttgttaggtttatatctaagtgtttcaccttttgtggagctgttgtaaatgatggcattttaaaatcttgtttttcaagtgttctagtatatagaaataactctttttaaaaaagaattaacattgtatcctccattcatgctgaccacatttgttctctgaacttttttggggtagattccatgggattttctatgtagacaatcatgccttttgtaaatagctcctatttttttttattcctttccaaggtgtatacacttcatttctttttcttgccttacttccttggctaggacttgcagtataatattgaataggagtggtaagagtaggtaggtgtctttgtcttgaaactgatcttctggggaaaaatttggcattttattgttaagtgtgtgttagctgtaggttttttaaaaaaattaatactccctataagtttagggaactttctacctggttctaatttgcggattttttaaatgaaaatatgttgaattttgtccagtgtattttctgcatctattgatatgatcttgtagtttttcttctgtatctgttaatgtggtggattatattgattgatttttcttccctggatgaaccgcatttgatcatggtgtattctttcatgtattactggatttgatacattgagctttttttgtttaatatttgcatggcgtatatttttccatttcttttacttttatgctaactatatcatatttaaagtgggtttcttttttttgttcttttgagacagagtcttgctctattgcccaggctggagtgcagtggcctgatcttgactcactgcaacctccacctcccaagttcaagtggttctcccgcctcagcctcccgagtagtggggattacaggcgagtgccaccatgcccagctaatctttgtattttttatagagatggggtttcaccatgttggctaggctgatctcgaacccttgacctcaagtgatctgcctaccttggcctcccaaagtgctaggtttacaggcgtgagccactgtgcctggcctaaagtgagtttcttataggcagcatggatctttcctttttaattgattctgataatttcagtcttttaattgatgtacttagaccatttacatttaatgtaatatgtttggattcaggtttggcattcccccgtttttgttcctcttgttaccctttcttgtcctcttttagattatttaatatttttagtatcttattactctgttgttgctgaaataggaacttcttaaagtatttttaatgttacaaattagggattaatgtatttcacgtgaacttaaaagttttactctaaatacttgctttgagatttgctgaattcttttttacgttagagagcaatttttggcttagaaaggagtacatcttcaatgagactaagtgaaaagaccaggatttaatcagaggtttctacagtatagacaagtttttggtaattttgtttctgcatgtctctgtaatctacttttgaacaccggtatatagaatgacttgaaattctagtatctaggcaccatgtcttagaatttttggctgtgacaacaggcatttggccacatttctagtcattagtccagtgattaatgttaaacagttttacttataggatgatcttaatagattttcctttcaaagataatatggggagaattattttaccgtgtgtcttttgttcagaattgtatctgacacatttattttatcttatttttacttttgtcttaaaaatgcatacttagtcttcatttttacaataaagttatttttattaaatggaagagtggacatgaagggataagagcatgaactaggggtaatggctataggcttagagaagagatcagaagcaggaagaatttctgagcctgataggacttggcaactgattgaatgtgaaggttgaggggaagcattggatgagtggtgacctagaggcaatgttgttgacataatcaagtaagtttgtagatcactgcacactactttccctctaccagagagtaaaatgcacataggcacgttacttagaagccctgtaatgaaaaatatccctttagtcttgtttaatgttgtggttcccaaacttacttgattttgagaaacttttaaaatgtaatgtctgttatcttacagagcattctaaagaaaatcttgatttaggaatacatttttaggcagatttcagaagaaagtgggtgataagacgttagcaccgaatacagcttttttttttaagtgataggagaagaaagattgtatgaggtgcatcaggtcattcacaagatgggcttttttaaaaattatttttttagtaggttatatatggacatgatacaaaatctaaaggatatttattaaaaaacaactatgcttccttttcttgttctttaacatccagtttacctccctggaggcatcgctgttatcagtatcttactcattattccagggatattctgtgcatttacagccatagacttatgcattcctaccccaccctatacacctccactcaaattgtaggcacacttttatttttttgttttggcagcttgctgtcttattcttttcatggctatatagtattatattgtactctatttagccagtcctttactgataggcctttagatcgtcttcctttttttttgctgttaaaatcaatgctgcagtgaataacctctgtgtgtatgtgtgtgtgtgtgtgtgtgtatcatttgtacttgtgtgtatctgtagtataaatgacttaagatacaattgctggcatgaagtgaagtagatttttaactttgacagtgctggctttaacagactgactacacctttgccaacccaatgtgtttgcaaacttgttttgaaactgataccttattgtaggccccctggcactgctaactagctaacttactgtcttttcctccttttcctcccctcccctcccttcccttcccctcattcacatggttggtcagctataaccaccatccatctccagatatttttcatcttctcaaattaaaactgtaccagttaggtgataactccccattttttccttcctccccccatcccctggtaaccactattctactttccatatgaatttggctattctagataccttacataagtggaatcctacagcatttgtccttttgtgtctggattatttcacatagcataatgttttctaggttcatctgtgttgtagcacgtgtcagaatttccttttttttaaggatgaacaatattttattttgtgaataatgtgaattattctgttcgctattgtgaatagtgctgctatgaatataggtatacaaatatttatttagttccctgctttaaattatttggggtgtatatctgaaagtggaattgctggatcatatggaaattctgtggatttttttttttttttttgaggcagggtctcactctgttgcccaggctgggagtgcagtggtgcaatcttggctcactgcagcctccgcctcccaggttcaagagccttcctgcctcagcctcctgagtagctgggactacaggtgtgcaccaccatgcccgactaattttttgtatttttagtagagacagggtttcaccatgttggccaggctgatcttgaactcctgacctcaggtgatgcatctgcctcagtctcccaaagtgctgggattacaggtgtgagccaccacgcccggccctatgttgtattttttaaggaacctccattctgtctttcacagcagctgtaccattttatattctcaacaccaaaatacaaggaatccagttttcccacattcttgtcaacacttgttactatattttttatatataaaataaatatattttgaagtggcatatcatcaaggaatatagtttgaagtggatttgaagtgaagtatcagcagggttttgatttgtatttcttcagtgattaattatgttgagcatcttttcatgtgtttattggccacatgtatatcatctttggagaaatgtctattcaagtcttttgcccattttttatttgggttgtttgtttttcttgttcagttgtagttctttatatattctggatattagtcccttatcagaagtgtaatttgcaaatattttctcctggtctgttggttgcccttttactttcttcttttattttgtcttacttaaaaaaaaaaatagctgccaggtagagtgcccttttactttcttgataatgttgtttgatgcacaaaaatttttaattttcactgtccagttagtgtttttttgtttttgcctatgcttttcatgtcatatctaagaaattgttgccaaatgtcatgaagcagcttccctgtgtttttttttttgagtttcctagatttagctttcatttaggttgctgtatccattttatatatgcttgtaaggtaagggtccaactttattcttttgcatgtggttccagttttctcaacacgatttgctgaaaacactgtccttacctttttgaatggtttttacactcttgtcaaaaatcatttggtcatacatttatgaggtcttatgtctgagctttgtattctattttttggtccgtaagtctgtatttatgttggtaccacattattttgatgagggtagctttatagtaagttttgaaaacagaaagatgagacttacaacttagtttttctttttaaatattgttttggttattggggaacccttgagactccatgtgaattttagaatgggcttttctgtttttgcaaaaaaaaaattactggattttactgggagttgcactgagtctgttggttgccatgggtagtattgacatcctaattattaaatatattcactccgtgaacataggatatctatttatttgtgtcttatttgttttagcaacactttatagtttttagtgtgcaagtcttgcaccttcttaagagtttagtccttttggttctagtttaaatgaattgcttacaaatttcctttttagattgctcattgttagtgcatagaaatgcagttgatttttgtgtgttgattttgcatcctgcaactttgctgaattttttttattagctttacaagggtgttttgtgtgtgtgtgtgtgtgtgtattctttagggttttctgcatattacatataagattgtatcatatgttggtagtagagagaacttgacttctttccaatttggaggctttttatttgtttttcttgcttaattgctctagctagaacttctagtatgttgttgaatagacatgttcatagtgagcatccttgtcttattcccaatcttaggggagagactcgcagtctttcatcatagagtgtgatgtcagtgtggggttttcatatatggcctttattatgttatggaagttcccttctgtttctaatttattgagtttttttttttaatcatgaaaggttgttggattttgtcaaaggcttttttggattcaatcgagattaccatgttttttcctcttcattctgctaatgtagtatattacattgatttttatatgttgaacccatccttgcattccagggtgtggcagagatcattcttggtcatgatgtatcattcttttaatgtgctaccgtatttagtttgccagcattttgttgaggatttttatatgtatattcataagagaaattagcctgtagttttcatatttttatctggctggctcacagaatgtgttccctcccttttcattgtttagaagagtttgagaggattggtgttaattctttgaatgtttggtagaattcatctgtgaaagcatctcttcttggtcctttctttgttgggaggtttttgattactgattcaatatgctacttgttacaagtctattcagatttcagttttggtagtttgtgtttttctaggaatttgtctattttatctaaattatcaaacttgttggcagtcagttgtttgtactatttctgtataatcccattaatttctgtaatagtttttattgttccacttttgtttgtgattttagtgatttgaatcttctctttttttcttagacagtctaataaagatttgtcaattttgttgatcttgtaaaaaaccaacttttggttgcattaatttttcagcattttataaaaattctgttttgtttatcattctctaatctttgttattcctttcttctgttagctttgggttcagtttactctttcttttttttccagtttcttaaagtgtacagtgaagttactgatttgaagtatttctttttttttgatgtaggtatttacagctataaatatctttcttagcattgctttgctgcatcccataaattttcgttgagttttcatttttgttggtctcagggtattttctcttttcttttgagacagagtctcactcactctgttgccctggctggagtgcagtggtgcaatatcggctcactgtaacttccatctcccgcgttgaagggattcttctgcctcagcctccctagtagttgggactacaggtgagggctaccatgcctggctaatttttgtatttttagtagagtcggggtttcaccatgttgtccaggctagtcttgaattcctggcctcaagcaatctgcctgcctcggcctcctaaagtgctgggagccactgtgcccagccatattttttaattatgcctatgatttcttctttgacccattgacagattattttgtaaaattttcatatatttatgactttttccaattttccttctattaatgatttttaatgttattgagcattccagttagaaaagatactttatatgatttcaatcttgttaaatttttcgagacttattttgtggcctctcatatgacctatcctggtgactgttccatgtttcccttagaaggtgtgtatttttcctgttgttgggtggaggtttctatatatgtctattaggtctaattggtctttagtggtgttcatgttctttatttccttctggctgttctgtcctttattgaaaaggggatattcatgtctcctccagctattatggtgaaataatttctcccttctgttctgtacatttttgctttgtacatttgagctctgttaggtatgtatgtatttataattgttgtatcttgatagattgaaccttttatcagtgtgaaatatcctttgtctcttgtgacttttttaatttaaagtctattttgtctgatactactatagctacttcatttcttttttggttactattggtatggaatatctttttcattccttcactttcaacctatttgtgcccttagatctacaagtgagtctcttatagacagtatatagttggatcctttttttaaaacaattgattctgccaatttatgctttttgattgggaagtttaatctgtttacatgtatagtaattactgatgggggaaagactttcgctgttttgttattttctgcatgttttatagcttttttttgactcatttctatattactgccttcctttgtgtttgatttttttttatggtgaatggttttgatctccttttcacttctttttaaaatataggtattttctttgtggttaccatggcgattacatagaacatcctaaggttataaaatgtattttgaatttataccaacttaacttcaatcacatacagaggctttattcctgttcagctccttcacctctttatattatttgtgtcacaaattatatctttatatattgtgtctccattaatatagatgtccagtgatgtgtattcatttttctttatcacatagaaaagaaaaaagtggagttacaaaccaaaatgacagtaatacttatttttgcctatgtgtttacctttatcagagatctgtgttttcatatagctttgagttactgtcttttcatttctacccgaagaacttcctttagcatttcttggattgcaggtctagtggtgaggaatgccctcaactcttgtttatctgggaatatcttaaatttcccctcatttttaaaagactgttgttttgctaaacatagaattcttggatgaagtattttgtttctctctcagcactttttaaatatatgtcatcccataaccttctgtgcttcagggtttctgctgagaaatctgataatcttgttgaagatttcttgtttgtgatgagtggtttttctcttgatgctttcaagattctctctttgttgttgttcaacagtttgattatagtgtgtcttggtgtgggtctgggtttatcctacttggatttcgttgagcttcttggatttgtagattcgtaccttatcaagcaatgtgtatgctcttgagtatctccaataaggcatttcaaaatacaaatttatgattttagtttatgatagatgtatatagctttaaataaccacaaaccatcttaagacgttatttaaaaaaaagagcagcattcacttatcccttttggctcacagttcccattcctcagatgtaattactttctgtttttggctatttttactctgctctttttattcatattttccagtggttggcatatcctgtttttgtttacttcttttttttttaattttatgtattattaactacctgtctataatttaagaggaccatgtagcatttttacatgtcctccctgtctctgcttctctaatctttttgctattgttgtatcacaatttttgttgaatcagtattcatgcttagatattatgtaattccattttgttcttgtacaggcttttagttgaatttaactgctttttttgttgcatagttttctatgtgtctgtcattaattcagtcagatactttttttgttgttaaaaattttactgctggagtctttcattgtcttgcttcaatttggactggcttctctcctgatcaaaggagagccgtcttcctggtgtcttcttaccctgtttttgccttttatttatttcctgttttctgtttcccaaagcacccttttttcaggttctatttagtttgttggaatattgctttaagtaacttttgggaacctgctcggaggtacttctttgaatttttatgtatctgaataactcttatattccttatactcctgcttcttattgttaagtagactgtttagaattctaggtcttaagtaactgttgccctcagaattttggatacattattctgttacctcctgtctttaagtgttgctattgaaaatcttgatgctattttcgttttctttgtatataacttgtttttttgtttttaaagctttgagattcctttttggtccttattccccatgatctggaatacaacagtggtacaccttgaagccgtgctatggatcctttaaaatttgtttgctagtgcttagtaggccttttttgagtggaggcttaagtcctccagccgtgggaaatttatattagtaatttgaaaatttccttttcttgttgcctatttgtttgtccttgttgtaatttttgaagtgatttcttctgcatactcttttaaatcatgtattgactttaaaattttcctgtacatagtttcatttctggaagcactttttttttgttctttggctgtttctttgttacagcatcctgttcttgtttcatggatggagggtctttttttaaggagtatttgttttttcttttaaagttttcatctttaaacatttcctccatgtttcttttttcttctccctcttttctctcttgctctctttttttggtctctagcattaatgttcaagaatttcttcaaatgtctggtgatccttggctaaccatttatacttgcgttgagtactgtcaggaagctctgtgtgcataggcaaggtttgttgactgataggtattttttgtagggatttaaggtagcaagctgatttatttattttttttaaattgagcaatctttaagtatcagcagattctacaaaagagtcttctgatcttcttcatctagtgttctgagaaccaggctgggcgtttcaaggttcagtatgttcacttggaattaatcctcctggtttcactaagacattttctattctctttccacttccctattccctaccatctctacaaaccactctaagctgtgaatcttttgtttaagcaagaaaggagaaacctttcttgtgagattagggtttggggacctgttcttttcaaacttttatctagatctttggttaaagttcactcttcttttggaaatactctcaagtgaattgccttttccaggtccgatatcccagatcgacttgtagtagcttttcccagccacagttaggttccatttttttctgttgtgcaaagtccattatcagttgtgcagtttccaaaatttggttgacatttcttgtctattttctcttcaaatgtatttgtctttatgggtttatgcctttaaaaatttcttagttgttactttacctaaggtataggggaaaggcaaatactaagtacatgtattcaatgtgctattttaaagcagaagtccaaacctttgtactggtttaagaaggagtacatcctgtccagaggtttgtgagtatttccaccagggggcacgtcctgttgaagctgtcgaaagaatatttaaaaattccagcacacaaaagaaacgaggttgagaatagagtggtcacaaaggattcagtagagaattgcatatttacaggcttcatactattcagtacatatgaatatatggctaagtaaaaaagactcctttcacgaatgatgttcataacttttattagtgttttgcaaataatttttattacatctgcatttctgttcctttcaaatatatacaattctacaaactgttaactaaatgtttctaaatatttggtcttacttagtgagtaggcatatcgtttatctttaggtgaaaatgactgcttaagttcttatgaggttttaaattttcttttttggtttaaacatgtctttggaatttgcactgttaatttgctttaagtctcctttttcatagctaactcaaaggatttcagccagttctggacaaagattctgaattagtgaagactttaaaatattagcttatgcttgctgcacatttaacctgcagcctggttttgtcagctaaataaataaaaactatacctcattctatacttctgaaatcctagaaaatttaacttctgatttttagttaaaataacctgtgtttgaaaacaatcttctgtccttcaaattactaatttttttcttcaattttagtttttattttttggggtggggggaagtatctgtggagaactgtcttttgtacattttcacagctatttctttgatcccattgaatttgttttcttttttctataataattggtaactaaaatgtttgagattaaaatgaatacagatattgtctatatcacaaagtatatttctttttctctcagtagtgttatttgctataatttcagtgtggtttgaaattttgcttaattagatttcaacttagccatgtttggagcgttaaaattgattgagtctgtttaaatgatccatttttagtgacatgtatatttcacctcttaaaataaatttttggagaatagagtacaaaagctttagtgaaaaatgtaatagcatggtttctaatgttaaatctcagagttatagaaagaaatggaattaaattctcattctgcttttttaactgttgttcttttgaaacaacctgtagatacgaatttagacttgttatttactttgtacaaaatcgaaataggtgcttaccattctgctgtattttatgttattgtgagcaccaggttcgtttgccttgcggttgcccagctttcttttgtcttgtcttaaattttctgtatagctatctaattttttgttgctctaggacataggacttatgataatttaatagagatatatatctgcatatataatgtgtatgtgacggtgttggtgcttatcagtttgtggtatttctgagattctgatataaagtatatgcttttgagatctgatttcttaaccttgtgatagtggtttatattaatgtatgattcagaaagctttcttgaatttaaaaatggaactgtgcaatcgtatttcagtttttcataattaccctatttccaaaacactttgtttcttaaatggaatattcacacaactttttcttacatgcgtgagttatgatgaattttttttaaagtcaacaatagttgattgaaagtaactcctataacatcagtgaacaatcaattctttacacattgacaacccaaggctttcactgatacctttagcttagttgcacagtatttatatgtggatagacttttaaaaatgtacttagcttacctacctgccatttttaatattttccagtcttcttgaaaaaagttattgatttgacctcctacctaaaataatgttctttagatctaaagctggttagacacattatctgactgagtttactgaagcaaaaacattccataaccttaaccttttccctgaccccctgcttttaacaactgccgacatagttttatgctgttatgtgaccatgctcggatgaaatctgtcaaacagctccttgagttattaggctgtctgagtctgacctttctgcaatcaaagatatatgacttaagggctcagatttgccatggcaaccggtccaatttgctgccgtgagaaaaggtctaattgttgcagaaatttaatgatctagagcgacatcagggctgtgagattttatgaactgtttacaccgtaattttcattttgttaatgcagtcttttttttgtaacccattcatggctagagcataagtgattgtgttttatttaaaatagcattgcatagcatgagagccgtatcggagaacatgtgccactctcgagaagcccttcatatgtggtgatatttcacttttaactcccttccttattttcattcttttaaaagatattttaactgcttagacctttgccagacctgcattcatcattggtagagaaagaactatgtacttttctcctccatcctcttctgatctgcttactgattgagtgcctgttgtaaaacagtaggaaatcacagagcatctgggggaggaggtatcatatcactgtctattattctttatcagcgcttggccataaaaattctgtatttggagaaaagtaggatattgttcagcatataattatagttagaaaccccatgtattttttagatggtgccatttactgcttagcagagatttctactctgattacagaaacatgaattacttgttgcatttgtccagtattgggtagagaaatgtttgtgtctattctcaaattaaaatttttcctcaaataggttaatagagggtggtatttaggagatgttgaaaggctgtgtgttgtgttgttatgcagtttaacttggaaatggttgattatataccgtaaaaaatgtgttgtattttcagtcatctaatttaggaatattttctgttcaggaacagaataacttgtcttaatctatgttatctatgcattatccagctggacaaaaattacctgtgcaacaaaactgttatgaaatactgcattttatgtgatgatccaactagatatttatcctatagaaacctggtagcaccaggcagcatctacaatctagttctgtactctgtaatagagagaaaatatgttagacattttattacgaacaaagtaatgtgctatatatatagcacaaaaatacacagtataacttattaaaagtccatttaaaaggaaaatagtgtaagatttttgaaaagcattactgttaaatcatacttgtagtgtgataggactacagttaaaatattcctacaggtcgtatatatgccatgctttacataatggttgtgttcattgtttcagatgtaagaaaaacaatagatgacttaaaaaaagtgatgaaaaattttgaatccagagttgaattcacagaagatttgcagaaaatgagcgatgtgagtatttgtttttagtcttctatatttttagaaaatattttcaaagaaatatgaagctatcttacagccaaggaacaaattaattgaagtttaaaatgctttcagacatcttaggttgaatagttgctctttggataattttagtatgctggagatttgtgttgttaatacgctttttttttgtttaaaaaccaggctgcaggtgatattgttgacatacgagaagaaattaaatgtgacttcgaatttaaaggtaagcagtaagattgttttatgtgtagctgtttagatattttgatttttgttgattttcagtgggctttctgtgagatatttgggatttagaatacacttttaaattcataggatgccaacatttttctactcattgatttttttttatgtgaaacattaatggataaataacttttggttaaaaatgtgattcctgactggtctgttttagtggtgggattacatggcttttttctcccaaagttctccagtgctccaaacctctaaaactcagaagatgtatattctagacatggatctgctcctaatttgttctctgaccatggtgaagtcctaagatatcttttgctagtttttcttcttttaaaactgcagctttgtaagctgtttttggaagaatgaatgaatgtgggtgtatttcagccattcctcttatggtgcctgcagtggctttccctgcgcaggttgttcccatctccacccagtagatttcttttgccaaggctggcttatgtgtttgggtttacttctgtaaagccaatggttccttcgtcagttgtaaagtgttaacggtagtgaaattgtaaaaagtattacagatggcttattatttgctactgtagaagactgtacagtgtcttaaacaaatgtactgagcattcgttttgactttcagcactcatattttggtgatgaactcttaagataacttactggttgaaagaagccacatcacaagtaacaggaagtggctttagaaggtgaaataaaggatatgtatattaaagttgaacagaaagacaagatttttgtttgtggtgaccagtgacaaattatgagcgctacaggtctgaaataaaaattgttaactactgtcttatcaataatagttacagagaataaggctgtgaaacataatttgatattttcagatgtatgcaacaatgcagcaaatttgaatatatgatggactcgaggtcatctggtagtgccatatctcataacaggacgcatcttagacttcttcccattactttcccattactttgctttaataaagcaaataaagccttaatttgctttattaaaaaataatctattttttaaaatgaaaagcagatacctctgagttcagatttgacccatcttttttcctcacatgaagattacaaatgaagcagtttaaaaagtagagatgttcatatgtaaaatgataatagaactttacagagatgagccgccgttgtttccttgtagggtactcattccttggcagtgccctggagtttaaagtatcctgtcacaaggcttttgcacgttactgtagtaactagatttccttgagtaaggatggtaaatggaaatttatcatttatgtgttgcatttcgccttataaccagggtgcattgtggccatttcttatgcatttttgaagctcttctcacaaccttgaatgtgtatgcaggttctctggggctcttgttgaaatacagattctgattcagtgggtctagggtgtccttagagcttacacttctgaagtgttccccaaggacgccagtgctgttgatccatggaccacactttgagtagcaaggctgtaagagacattcatccttggagttctgtttggcttaaaaattgtgacccctctgtttcaatatttcccttgccccaaaagaaagtctcattaagtctgggtttgtgccttttttatgttggctattaacagccacgtcttttcctttttctaaatagcaaaacaccgaattgctcataaaccgcattccaaaccaaaaacttcagatatttttgaagcagatattgcaaatgatgtgaaatccaaggatttgctagctgataaagaactgtgggctcgacttgaagaactagagagacaggaagaattgctgggtgaacttgataggtacttgatgacaaattatctttccaagataatttgtttctatacacatttcctcattaatctttttcttcattaataaaataatatgtgttcattgaagaaaatgcagggaagcataatatattatcaataatcctttcacctcaagatgaacattaattctctggaatattttcttataggattgtgtgtttgtgcatattcccatgcatgtacatgtacttaaatacttaagatcaacatcttcattttttattatggcctattttatataattaattataccagatagttgacttttaataatcatggatttaatatatataatgttaaattttaaatgaagtatttttatgccacacccaggatagtgctctatctttgaatgtgttgtgaaaaacaaaaatacactttgaatttaaatttgatacagtaaaatgtttattcttgctttccttttataaactttggagcaggtaatttgtaatctggtcagatagctatatgtatgagaaactttacgaaattgctgtttgaaatacacattagcacacacttagaattgttaaaatgctaaatgaaatctgctactcgagaagttctatattattttgcttaaatgatgtaccatatgcaataattagtttctgtgaaaaatagggcaggaagcataaaagtttctttttcctagtgtttcacctataaattcttaggtctttttgattaactaatactattcattttttaaaaccagttttggatcttgtgatttttcttggtcatgattctctttctattttttgtatgatgttatttcagttctgttgcattttcaattttgttatttttgtaaggtcctcacatcttttatagaatcaagtatgataaatgttcactcatgcatatagatatattcgtgtgcatatgtataaatcctttatttttaaaaattacaataatacatgctcattgtaaaatattctgagtataggagtagaaaataagtgtgtattatgtggtttcaatttctggtctttagagataaatgttctctgaatttcttacaactttattattattgatactatatttatattgcatatggccaatatctttcttgcaaagataaaaaaattatcttctatattctacttatgtctgaataacctcaatatatagaagcagcataggaactgttttttgttaatttatttcaaaacatttttttgtttttgaacttagaattctagttttaaaaatactttattcaagatcttagtatttacccatggaaactaactggaaatttaaataatgtaaaattctagtatgtttgtttgatcttgttaattttcttccttgctagtaagcctgatactgtgattgcaaatggagaagatacgacatcttctgaagaggaaaaggaagatcgtaacacaaatgtgaatgcgatgcatcaagtaacagactctcatactccttgtcataaggatgttgcaagttcagaaccattcagtggtcaagtgaatagtcagttgaactgttcagtgaatggttccagttcttaccacagtgatgatgatgatgatgatgatgatgacgacgacgacgacaacattgacgacgatgatggtgataacgaccatgaggctttaggggttggagataattctataccaacaatatatttttcacatactgttgagcctaagagggtttgtatacttttaactttactaattttgcatataatttgaacattaagcattatgatattttttagaagagcaatattaacaatcattatcattgtggatagtgccagacaggaaaatcatcttttgcctcttgttctgaccaatttaagaagaaaaagggaaaaaaaatttagttagctggtattggtccattgttctctgaaacaatgcattgtttggggtctggaaggggatcagatttgagtggcaactactgtaacttcacctgtccttcattcagagagttttcttaagaatcctggagttaattatattgtggacattttggtgtgcttaggatgttgaaagtgactgcattagttaaatttttaattatgccaggttgttttctatggacataaaatgaatacttcataggcacaaagggaaaatgtaggaggaagtaaaaattagtttcttttctgacaaagtaaatataaacatctgtggataatcatgacttagaattttggcattttagagctgggggtgactggagattttctaatacagagttttaaagcttttctctagtatgaaaagccttttgttccctccatacttactgtagaatcccagtatttaaaatagatcaaagcagcttggctctgattgaaggaaggataggctgccttaagtccatctttgccctctctctgctccatgtactgctctaaggggacactgggaattcgtctaattcgtctttctcagggaaatttaaggcctagaagacatagatctggttggtaacaaaacaggaactctttcgcctctgagtgccctttctacacaatatcccgattgcctgtatcagttaagggtctgtggtatcattcttaagtgtgtgtgattattatttagtgaaatatgtttaaaacatatttgatatttcttagcttcctaaagttattcctgctcctatatgaagtgaaataattgtttgtgtttttatattctaatatgtcagactgaaggggtcttcccctgattcttcgggaaaagttgactgagatgattagccagaaaaaaaggtcgctttttaatcttttgccaggcttttacttttttcctgttttcatttagataaaacagaaagaacaaatattatttgcaggaacgttacaggtaatagtggtcattattgtggaaagtatgctctaagtgctgactagggatagaaaaataacatgttaaccccatgtgaaccctgaacaggcttggtttttatttttttactccttcaatttctaaaaattagagatgttttaaaaattctaaataggcattatttaatagtacttttatgacttaaaggttgtattcttactgaatttttgtttatactctttcttttgaaatacataattcaagccaaacacttatatcaaaggaatggggtgatgggaagtttataagaaatctagcatttagttcaaatgtattttgctttctctacaataataaagacactgaagactaggatttgttaataaagaagattttctttagatgtcatagatctatgagataaggactttttaaaaaattccatctgataatgcacatcatttcagcatcagaaaatttcagctgcctctcttactattatttttttagttatagagtttatttgttttggtttcactttgatttaatttgtcaaaagattcttaatttcttgctctgaaattttaggtccgaataaatactggaaagaataccactttaaaattcagtgaaaagaaagaagaagccaaacgtaaacgaaagaacagcactggcagtggccactctgcccaggagctgccgaccatcaggacgcctgcagacatttacaggtgggaggcgctcacagctgcagggcagtctgctgggcttgcctctctttctgccactgaacctttactggagaaagttgactgtaacacagaagaccctcactgaaaagtgaagtgttctgaggagttaacttaggatctgataggctgaccggctgtagcttcccagtccagagcagtgggaatggaggattttttttttttttcactttctcctcttcaccagtgcttttgaaacatttccaaatggtctagtcagaaaatcttgtatcttcagaaagcatttttgtttccagtgggctaggtccctacgtttctaccacagccgtaacatgcttggcatgcagtttaccttttcagagtagaaattatactgttgcaggttttttttttttttccttttttttggaattgtttgttgagaaaactatcacttgaaaatacctactgtttttatgacccttatttataaatcagtgaaaattgctaaatgtatacgtgggtctaaaactttatgtagaattttggcaaaccatgctattgccacctaggacatgcttaaaaataacatgctgtgtttttgttctcactcataggtgggaattgaacaatgagaacacttggacacagggtggggaacaccacacaccggggtctgtcatggggtggggggaggggggaaggatagcattaggagatacacctaatgtaaatgatgagttaatgggtgcagcacaccaacatggcacatgtatacatatgtaacaaacctgcacgttgtgcacatgtaccctagaacttaaagtataataaaataaataaataacatgctgtgttttattattaggccagagaaatagctttcaaaatagtatgaagataccatttgaggctataaaattattgtgattgtgactattttagatataagattgtaataaaaattttcagattaatttctagaatagattcaaggaaattttcaaaaagttgttctcagttttatgagttacgtatagtgaatgcatatgtgttttgaatatcacagagcctttgttgatgttgtgaatggagaatatgtccctcgcaaatccatcctgaagtctcgaagtagagagaatagtgtgtgtagcgacactagtgaaagcagtgctgctgaatttgatgataggcggggagttttgaggagtatcagctgcgaagaagccacttgcagtgacaccagtgagagcattttggaagaggaaccacaagaaaatcaaaagaaacttttgcccttatcagtaacacctgaggtgtgtgtgtgtatcttttaattctttatttcatatagtatctttgaccagttttagctatttaatctgaaaagtcataagattaaattaattctaggttttatactttcttggtactaattaataaaaaattaatagtcacaaacagtacaaatattgtgataatcaaatagtttattttttgataaacacattacttgtcttaacgttctatttcagcaaaatgggaaatttaaaatgtcttacttggcattatgtattacatttgtagctaggaaattatttcgcagtttattttaaataaattaccagtaggtcattttctgatagtgtaaggagcagattacattattctcttttaaataccttggctaagttaaagaaaaataatgcatgcatagcagataattacctaaagtctaatattttaccttgtaccagtgaaacttaactcttgggggattatggaattgttttataatctgatgaaagctgtagaccctgtccatagaaaaaatagtgcacactcaatacactttcacccaccacacttcttacagtttttggtggtggtgcaggggaggttaggaaatccccaaataaggatgtctgtgaaatataaggctattgatttcttcattcttgtgttttggtgcgtatttgaagttttcaatttaaaaagtatttaggaagattggggaacccatgcctggatcaaaccagtgtacacatttgtatatacaataagatacatgcatatatataaccttatctaaaaattccattgcttttactaaatggtattatactcagtgtattaaatggtaattggggatggagattggtagcatttagggacagtacatatgactagaatgttttcttcccctcttcttagtataatgatcttaggtgacctggaaagtatcttaccttatttgatagtcttccatactgttagaaaacaggtaatggatgttatcaggtaattgctgataaatgtttgaaaattagttttttgtaaggacttagtgtatcatggtacagctagagtgtggaacctattttttatttcacccttagtagctttgcattttgtatggaaatgtttaatagtagttgctatacattttttaacatcaaagaaatagttcatgattatggtaagtactttggaagatatccttttcagtatctttttaaatgctaaaatacctctttttcaaaggcattttaaatagaagaaggagaagaaggctctatgctcatcgtgataaagtggagtttttaggaaagtaagctttaagctgcttttaccagttgaactccaaaaataatgtaggagagagatggctttctttgtttttgtttcagtggtggggcaaggtagaagaaggtggctttttaaattatttaggtgttacgttgttttaactaattttgagcacttggtagacagaggagaacaaaatgtacattaaagttcacctgtcaaattttcatttgtagagggaaggatggaggttctaaataccagcaatcttaaaaaaaaaaaaaaaattaactccttgtgtcttacctatttttgtataaaacgacatgtacagatatttccagcaatttatgcacattctttaattctgttccagttgaacatatagttgaccagattaaatgcagcaaacatccaggtgaaattgagtcatttctttttttgtggaacttctgatttctgtcattgagttaattatattaaaattttgaaacctgtacttattcctactagtatcagcacttttatttttcaacttccactgatcttttaaaattgaggcaatatgcagtaaaatatttaaataattgcataaacaccaccaaagagatatcagttagaaatgtcagtactggtgaaactaagctattggctagcaggcagcaaggccatcataggatagctcattcatcaactgatgtacaaaagtcagagtttgacaccctaatagcatttttattttaatacattatttttcacagcatgggctggacatgaatggaatgtatgaaagtttgaagaccttttatttatccatttcttttttttcccagataaaatttacattttacattttgttttcttgcatgtatactgtaaaaattacttctgtttggtggtgaaattaaaacttaatggtgttggtttctctgaacaattagtattttggtgtagtagtgttgtctagccaaaaatctcgtgaatttacttttaatgaaaagaattgccaaatgagtgaatgggaagattttgtgggtgtcttatttgcattttattaccataacctgacttttgttttctaggctttttctggaactgttatagaaaaagaatttgtatcaccttccttaacaccacccccagccattgctcatcccgcactacccactattccagaacgaaaggaagttctgttggaagcatctgaagaaactggaaagagggtttcaaagtttaaagctgccagattgcaacagaaagactaggccctgtctaggaaatgggaatttacatcctaaaacctagttgttcatttgtttagagtatctatagcaaaataggttacatgtagtttgaaataaggtatcctgagttactttggcaacaagttcttttacccttacccgtggtatttgaaaaaaatcaaggtaactgtctgaatactttaatatcagcttgttttgtgaattctctgaatactgtcaacactcttatctaagtttgcctttatgatgcagtggcagcattttgaattacttttcaaagaatactgttcatatgcattgtttttgtgtttcaaactaaatacaggcagttttgtgccagctgtgatattgtgcataccatatggaccattttaaagaaaattttaaaatttcaaatagattcaacaattacattacttgctttcacattttaaaggcactttaaaaaaatctacttctcttgtaggttttgcggctagttggctattcaagaaacctcgcccctctgaatgtcatactgtaatctttaaggaagaaagctacatgaattaattgtactctatgggaaaatttctttggaaagatattttgtaaaacttttttttccaagtaaaaactttatgaaacttggtctcaaaaatgttgtgaactttatgattcaaaattgagtacagatatgtccttgattcatatgtatgctacatgtatcacacaacagatctggaattctttcagttcctcagatacttctcccttagtttttgcagtttcactgggattatgttttgggaaacaaggaaaggtctagatgcttaaacattttaaataaaaattccttacagtttcatcttcccaacattttcattctttaaggctactttcctactaactgaaataacacatttacttttaccacaattcctcaaaataaatttattctaacattgaaaataacattacaagttaatcattagcttgatgcatgctaaaatgtagcttttaaaaagcattctgcattagtactaaaataagccatcaatgccagtccaccctctctattcatggctaaatatttaaaggttatttatagcttctttaatgaattcttcttaaacaaagtgaaattatgtcctagaaaagtagaagctattcgtaactagagcagtgcaactttaaagttttatgaatatgtattttaatgacaagggggcgagcttgcatccccactagttaatggataattcaaaccgaggactgattttgaaagatcacctaaaaatgtagatttgttctttagtaaatttagatcaactatgcatatattttgtaggtaaatctttcagtccatgccccaaccctcaccaaaaccaaagcagaaattacacacacaaagatgctcccgttaggaattgctattcacatgaggctttctgtgctagatttttttctcagaaacaaactttactgtaggactattgtggtgttcttaacagatttgtaatttcaagatgcgtgtcattaaataatttttcatgttcacagacttgattttgagcctgtctatgttacatctttcagataggttttccctcatagaacaagatggtagtagaagcagataaagtgtttgataacacatttttgcgtgttctgctctggagaccatgaaatagtgttgccccatttcatagcttcagtcttataacagagtattaaattgtaatttaaaattatagcttttttatattaaagtttgggacaaaatgaagctgtcttacctgttctgttttaaaccattataaaacagaacagcagaccaagagattctcttttaaactttctattttgaaatataataactttagtctttcagaaaattgcactaaatagtaccaagagttcccatataccctcatttcattcagcctccctcaatattgtaatatagaaccgtaatataattatccaaatcaggaaatttatgttggtgcaatagcgttagacctaaattacagatcttacttgaatttcaccaacttttccaccaaattttccattagaaaaagaactagtgttcttctgttcctcacatcttgtctatgaccctatcttgcatttatttgttacttactgctccttagtctttcctccaatctcagacagttcctcagtttgtctttcataactgatacttttgaagagtactggtgggatattttgaggatgttcctcagtttggatttatttgatgtactcagatgccttgaggttttgcaattttgaagagaataccacagaaaatgcatcatatcaagaggtgcattctagtgtgtcatttcaagttccttattttggtgtatcagtcttaatcacttggttaaggtggtgtctgccaggtatctccactgcaaaattactgtttccctttgtagttaatatcttgggagagatacatgagacatgaaaattcttttctcctccaacttatgctaagttttgcattcattagtggatcttgtctgtaacagttaccgctgtggtgtttgcctaaaggtgattttctgttttgctcttttgcacatttatttcttgaaattcttttataataacaagctttgcctccatacctctctctccaagtttatttgattatttatatctgtggacacctggatattttattatatgggttaaaattcattacttactatcattgttttgttgctcaaattcttctgcatttgcccattaggaactcctttgagttaactcctaggttctttaacaagttcccatatttttttgaacactttcttactggcaccacaaaatactacaggaccatctatttttcctctcccagccctggaaacaaccacttcaaggaaccctggttcctttaattggaaaatggtatttagaaaccaacatttgttcatttaagtatactaattgccaatagggtgtcattgcctcttgggcctttcaggagatacagctgggaaatatatgtatgtgtattaatgaatatacatttatgtgtctgcttattaaaaactcatgagttttgtactgatacttctgattctaatttaacaccacaggattaatttctggttttccttatttgttattttttccaatatgggtaacctgcctcttgtctgcagtgtatttacttactgtttttttgttgttgtgtcagtgtaatatacatgtagtttcagaagagctaattcataccctaggagaaacacattaactacattgcactgttctgcaattctttttgggttttgcctcatatatcagtcaagaaacagtttttcaaagttactgacgttcttttctttcccaccctctctgatctgtggactgatttgtactcttggtcctttttttactgtttgagcgttctctccacagcctggttgattttaatggtttattttttcagtatgtgaaacgtggttttcagagtgtgagctttgtaaaaggatatacatggagaagtgttgttcgtacctcattcctaccaccccattcccgttcccagctgctttctctcactttcccacctgcccatagtaagtaagctctagtttcttgtttagcctttctatgtctcttttgcacaaatccccacctacctactataaagaaccaatatttttagcttctggtttaacttttctatattctatactcatagcaaatacatgtatattttctttttcctttttttcttttcttttttctttttttttttgagacagggttacttttgcccaggctcaagtgcagtggtgcaatctcggctcactgcaacctctgcctcctgcgttcaggtgattctcatgcctcaacctcctgagcagctgggactacaggtacgtgccaccatgcgcaggtaatttttttttttttgtatgttttggtagagacagggttttgcatcttggtcaggttggtctagaacgcctgacctcaagtgatctacctccctcagcctcccaaagtgctggaattacaggcgtgagccactgtgcccggccaattttcttacatgcatttatttcttacatgaagaaagacattgtccattgcactttaattttttcagttaatattatgcccttgcgatccctctgtatcagtttttctgccttctttttttttttttttaaacagctatagtactccgttgtatagatggtacataatttgttcagccgctttcctaggtatgggcgtttaggttgtttgtgatgtttggcaattacatataatgatgcaatgaataactttatatatgtatttttgtatcattagaggtatatcttcagggtagatttctaggagtaggactgttgggccatatgaacacttactttgatttctttaaaacatagtaaaatctgttttgaagtatatttgttttgttcccttattgaggacatagtggttttttttgtttgtttgtttgagacggagtctcgctctgtcgcccaggctggagcgcagtggcccgatctcgactcactgcaagctctgcctcctggttcacgccattctcctgcctcagcctcccgagtagctggcactataggcacctgctaccacgcccggctaattttttgtatttttagtagagacggggtttcactgtgttagccaggatggtcttgatctcctgacctcatgatccacccgcctcggcctcccaaagtgctgggtttacaggtgtgtgccaccacgcctggcccgaggacatagttttaacatatacgtatgtctgcatatcattgatgattttttagaatgattctggggcagtatggtatcttaaaggggtttcagaatcattaaaaacattgtgttacataatgattatgttcattttactaaaatgtgatttttttaaaattggtcatgcatatttaagagctttccattcattgaaataattcctaatttgtgaaatgcaggtgtctattttacagatttgtctcctccataagaaacaggttttcaagggtaaaactgatctttatctatctgttctttaggtggtggcatgtaggctgtcaagcaaaggcctattaagtgaattcctcagttaaaataaatatgatttatatatttaattggtcagtattaaatttttacattttaaaataatttaaatttcattttagaagaatatcatttaggattaaagaatgtttttgcagttcccttaaccaataagtcacaaagagttaaatattttttttagcacttactatgtgtcatgcatttttagcacacttggtgtggattatctcatttaattgctcacagcatcccagtgaggtaggcactattgttttatccttcaccctcatcctaagacagagactaacattttaagccacacaactgttaagtaggttacactcaggcagctttgctccagaaccagcactcgtaacacatttttttgacttttttttttttttaacattgccatctaaacaagacactcagctagtgaggaaatatgtgatctatatgatgtctccataatttcacctacttacaatgaggccaccttttaaaaaatctgaatttttgaagcctgttttgtttgttaaactttctacataagaaaattaatgttgacttggtggaatagggtggagtttttcaatgatgttatttggccatatacacaaaaggaatatgataggtggagaatagtaaaattaagaagtaatcagtgtaacagtatttctctgaaaagctgctcatttttttatgtgaatttaggcattgtgtgcatgtgagtttaaaattagtgtgttcctcatcaagtgacctcatagtgaccgtttttatccctaatcatgttttttcctttagagagtaatagagctagatattttcctaatataacaggttccatcttttgtgtgtgagacagctttctgttttgtttttgtttatatgcatacatgcacctaatacaattatgctattattagcgtaaacagttgtttcagtacctttagtgatgtttggttacatggatgaattgtgcagtgatgaagttggagattttactgcatctgttacccgagtagtgtacgttgtacccaatatgtagttttttatccctcaccccacacccggcctcccccttctgggtctccagtgtccattatattactctactctgtatgccttttcgtacccatagcttagctcccacttataagtgagaacaggtggtatttggttttccacccctgagttacttcactggaggatagtggcctgcagttccatccaagttgctgcaaaagacatcatttcattcacttttatggctgagtagtatgccatggtgtatatgtaccacattttcgttatccacttattgactgacagacacttaggttggttccatatctttgcagctgtgaattgtgctgcaataaatgtgcagttgtcttttcgatacagtgacttcttttcctttgggtagatagtagtgggattgctggatcaaacggtagatctacttgtagttctttgagaaatctccatagtgttttccacagaggttgtactaatttacattcccaccagcagtgtataagtgttcccttttcatcacatccatgcattatctattgctttttgactttttagtaataaccattgtagctggggtaaggtggtatctcattgtggctttaatttgcatttccctaatgaatattttttcatgtttggccatttgtttatcttctttagagaaatgtctgtcatttgcccactttttaatgggattttttttcttgttgatttgtttgagttccttgtagattctggatattagtcctttgtcagatacatggtttgcaaatattttctcccgttttgtgggttgtctgtttactctgatgatgatttctttgactgtgcggatgcttcttaatctaattaggttattttttaaaatttattttattttattttttatttttttttgtgacggagtcttgctctgtcacctagactggagggagtaatctcggctcactgcaacctccacctcccaggttcacgtaattctcctgcctcagcctcccaagtagctgggattacaggcgtgtgcaaccacacctggctaatttttgtattcttaataatagagatggggtttcaccatgttggccagcctggtctcaaactcctgatctcacgtgatttacaaagttgtaaaaaaccctagctgaaataaaataaactacaagggtggctttaatacttctgaagacacaatagcactcgccttggcctcccaaagtgcagggattacaggcatgagccactgtgcccagccctaattaggttctatttattcatttttgtttttgttgcatttacttttggggtcttagtcataaattgtttgcctaggccaatgtctgggaaagtttttctaggttttcttctagaatttttatggtttcaggatttatatttgtttttaatccatcttcaattgatttgtgtatatcgtgagagatgaggatccagtttcattcttctacatgtggctatccagttttcccagcaccatttattgcatttattgactagggtgtccttttccccagttgatgtttttgtatgctttgttgaagatcagctggttctaagtatttgactttattcctgggttctctattctgttccattgttctatgtatctatttttataccagtgccatgctgttttggttactatagccttgtattataatttgaaggcaggtaatgtgatgcctccagatttattatttttgcttaggattactttggttatttgggctcttttttggttccatatgaacttcagaatttttttctaattttgtgaaaaatattgttagtattttgataggaattgtattacgtctgtgaattgctttgagcagtatgatatcgattcttccaatctgtgagtatgggatatatttccatttgtgtcatctgtgacgatttctttcagcagtgtttagtagcccaccttgttgtgatctttcacctccttggttaagtatattcctaagtattttattttattcttgtttttagcagttgtaaaagggattggattttttatttgattcacagcttggatgttggtgtacagcattgctactgatttgtgtagatttattatgtaacctgagactttactgaatttatttatcaaatttagaagtgttttggaggagtctttagggtcttccaggtgtaagattgtatcaatggtgaacagagataatttgacttcctcttttccaatttggataccctttatttctttctcttgcctgattgctctggctaggacttcctgaaaacagtttttaacctactctgacagtgtcttaaaactgtcaagtatagtctgtattttattgtaattactcttactgggaggactttactaatttgctttgggcattttatttaccctgcttgttgattgcctttccttttcttttttttttttttttaactgttgctcagacttaagtacttccctcttcctctactgatggggaagttacatatttgctatattttaatgttttggcacttgaaaagtatgtactattatcactttattgtagcgtttatagtacttggtttcatttgtgtctaacagctttattgaggtataatttacattctgtaacatccactttacagtatgcactttggggttttttagtagattttgagttgtgccatgttgaccacaactcagttgtagaacatttccattgttttaaaaacatcccttttgcctatttacagtaaattcctgttcctatccccaaccccgggacaccttaactaatatgctttctctatagagttctcttttctggacaattaatagaatcatacagtatgtagtgttttgcatttacctttcgatataaggtttttgaggttcatccattttttaaaaatcatgcatcagtaacttgttttttcttattgctgcatggtattacattgtatggatataccacattttgcttattcattcacaagttgatagaccctgaattgttcaggctataatcaataatgttgctatgaacattcatatatcagcccttgtgtgaatatgtgtttttatttatttagggtaaatacctaggagtggaattgttgggttggatggtgaattcaggtttaactttttaagaaattgcacagtttttcaaagaggctgtataattttatattcccatcagcaatgtttgagatttccagtttctccacatctttggcagcactgttactattttgtcttttttattatagcctttatagtggctgtggaatataataattgtattaatttacatttctgtagcgactaatgatgttgaaggtcttttcatgtgcttttagttctatttacatcttcttggaagtatctattcaaatctttggctcagtctttaattggttgtcttactgagttataagaagttctttttaaaaatttatttattttaattagagacagggtcttgctctgtcacccagtagggtgcagcgtcatgatcatggctcactgcagccttgacctcctgggctcaagtgatcctcccacctcagcctcctgagaagctgggattacaggcacgtgccaccatgcccagctaatttttaaattttttgcagaggcagggtctcgctgtgttgcccaggctgatctagaactcctagcttcaagcagtgctcctgcatagacctcccaaagtgctgggattacaggtgtgtttaagagttctttatatagtctaaatacaagccctttgtcaaatatatgaattgcaaatattttctctaagtctgtggcttgtctttgattttttaaatgtcttttgaagcacaaaatctttagttttaatgaagtccaattgatatacctcaatatatattatacctccataaagctgttagatacaaatgaaaccaaagtactatagacacaaatgaaaccaaagtactataaacactacaataaagtgatcataatagtacatactttttaagtgccaaaacatttatatatatatatatatatatatatatatatatatatatatatatatatatatttgtggttagtgtttttggtatcttatctaagaattctttaatccagaataataaaacttttctcccatgttttcttctagaagttttatacttcagctcttaagagttagggctatgatctgttttgtgtgtggggtgagtccagggtctaaatctgactttttgcacggataattttaataccatttaatagttctagagctgttgaaaagactgtcctttttgcagtgaatgctttagcatctttttttgaaaatagttgactataagcataaggttgtttgtgtactgagtgcttgtctgtccttatatcacttccagtggtcttaattactgtggctttacttacaacaaactttcaaatatggaactgttaaacccttcaattttgttctttttcaaaatttttttggggtattctgagccctttccatatccacataaattttaaggtcagcttacccacttctgcaaaaatgccttttgggatttttacagggattgtgttaaatctgtagatgaatttggggagaattgccatgcttatattgagtctgcgaatctgtgaacatggaatgtttatttgtttatatcttgattagtttctctcagtgtgtataaaagattactttcaaaacattgttttcagtttacaaatctttcgttaaatttattcctaaatttttaattctttcaggtgcagttgtaaatggagttttttccttaatgtcatttttgaattgttcgttgataatatatgtataattaatttttgtatattggctttgtatcctgcaaccttcctgagctcatttattagttcttgtcaagggggtgtgtgtgagagggagagtgagtgagtgtatgtgtgtgattgtatattctttaatatttgctacgtataggattgtgtcatttgtgaatagagaatcttacttctttccaatcttgattccttgtctttttcttgcctgattatattggctagagtctctagtaaaccttgaatagaagtgggtgagaacacctatccttccttgttcccaatcttagggagaagatattcaacctttcatcagtaggtatgatgttggctataggttttctgtagctgccttttattagattgagaaaaattccttttattcgtaggtttgttggagttttctttcatgaatggagttgaatttttcagacgctttttatgcagcccttgttccttctttagtataatacattaattttctgattaaattttctgattaaattaattttctgattaaaccaatcctgcattcctgggataaagcccatttttaatgtgcgtgatcctttttatatgttactgaatttggtttgctgatgttttgttgagaatatttgtgtatatattcatgagggatattgatctgtcatgttctatttttgtgatgtctttgtttggtttttatataaggataatattgacctcacaaaatcagatgggaagtatactcttctggatgaatttgtgaaggactagtactatttcttctttaaatgtttgatagaattcatcagtgaaaccattgggcctgcagttttctttgtgtgaagatttgtaattgctattaaagttcttattttaagtctatttaagttttatatttcttcttgagtccatttgataatttgactctttgtaggaatttgtccatttcatgtaaattattgcatttgtcatcataaagttgtccaaagtattcctttataatccatttaatttcttaagttggcagcaatttcctttttattttactttttttgtagagacagggtctcactatgttgtccaggctggtttcaaactcctaggctcaagtgatcctcctgccttggcctcccaaagtgctggtattgcatgtgtgaggcaccgtgcctggcctgtgatttccttctgattttgctaatttttgtcctatattttttgtaattctaactataggtctgtcagttttattgaccttttcagagaaactttttgattttgttgattttcctctagttttctattccagtgacttttactttaatctttattatttcctttcttcttccttgccttttatagtttttaaaggtgttaatctattgatttgagactactgtcttctaatgtaggtgtttaaagatataaattgacctctaggcactaacccttagctgcatccagtgacatttgatttgttttaatttttctgtagttaaaaatattttctaatttctcttgagatgtcttttttgactcatgggttactgtaatatgtattgtttaatttccaaatattagtgggtttctcaagtttctttctgttggttcctgctttaattgtgttgtgtctggagaaaacatttattatgtctttagtttttaaaaattcattaggactttttaaaaatgggtagcatatgttctcctgtgtgtgcttcaaaagaatacgtattctgttgttttatggagtgttctgttgatgtcatgtcaaggtcattgttattgttgtcttctgtattcttgctgattttttgtctacttgtgctatccgttattgagagtgggatactgaggccttacactattattgttaaatagtcctacctttcaagttctgttagtttttgtttcatgcatttttttctctgttgttaggtacatatatgtttgtcattgtcatatcttctgattaattgaagcttttattattacaaaatgtcccttttttctctagtaacattttaattttaaagcctatgtcagttttgtctgatatgattatgaccactccaccttggttatggttatgcttatgtggtatctcttttttcatcctttttagcatttgtatcttgtgggcagcatgtggttgaattttgtttttaaaaagtctattttgccagcctgtctttttattgaaatgtgtgttaattcatgtaattgttgatatggctcatttacatatcaatagctcatgccattttgttagtcattttttatatgtcatgtcttttttgttcctctgttcctccttggttacctttttttgtgtatgttaaataaatcttttagtataaactttgaattcctttacaaaaagaaactgtactttttttttttttaaacccacaaatttatttcttacatttgtggaaactgggaagtcaaggttagcagctgatttggttcctgccgagggctctcttcctgggctgcagatggcctcctgtgtcctcacatagtagaagagagctttactcttttttatgagttattttatagtggttgctctagagtttataggatgcattgtaacattataacctgcgtcagaataatactaacttaattctggcagactttgcttcagcatagctctagtctctttttcctttgtcctattattgtaatatattttataacagtacaggtttattatttataactatatgggttcattatttttccatgcaattatcttttaagtaagagaagaaaacttaaaaagagtattttttctattttttacatttgcctacataattacttttactggtactttaattttttatgtggattcaagttaccatctggtggtgtttcctttcagcctgaagtacttgctttagcatatcttgtaaaaaaaattttggtggcaacaaattctctttgtctatctgggaagatctttatttttgtcctcttttttgaaggatagttttactggatttagaattcttgtttgacagtagagtatgttataccacttaattctggccttcattgtttcttttgagaagtcagctgctaattttactggggttcccctgtgcatgataagtccatttttctcttgctgctttcaagattttgatgtgtatcggtgtggatattttaatgtttattctacttggattttattgagatacttggatatacagatttatacttcttactaaatttggaatgttttcagacattaaaaacttctatgactcttcaaaagatgtcaaaacttgtatggccctcactattcttttcttctgggattcccattatgcatatgttggtattgattgtaacccacagatttcctacttggttcatttttcattctcacttctgttcttcagattgtgtaatttgtattgatttatctttgagttcactgattcttccttctgcattcaagtttgctgttgtccctctaatgaagctttcactttagttacttttcaactccagaatttccattttttaaaaaatgttgatctctttattaagtgttctctgattagtcattgttttcatgctttgattaaacacggttttcttttgttctttgaagatgtatttttattggctgctttgaagtctgtctgttaagtccaacatttgggaacccttggaaatagcttctgtttatactgagtatttttttttttatactagataagccatactttcctgtttaaaactggacattttaaataatacattgtaacagcatttatttctgatactctcctgccaggggttattgtccctttttttgtttgttttatgacttggccaagattaataatgagtttttctctacagcgtgtggcctctgatgtctctcctcagttatgtttgactacttatgggtcaccttggatcaatatatcttagtgatcagctggtgactggtcagagattgtacttaggcatcttgttttggtaagactttcatcctttgtcaaagtctctgttttgtttgaggaacacactgaaaatttatgcagtttacgagtcttccctgggggtatgtatatagttagagccttctctggtctctcagcatgttcataccctaatatgcccattacctttcaaaatgtaagcttatcaaggactatgattgtctcacttcctgattgtttctgttaaatctccaggcagaaaatttttttcttctgatctcttttttggcccagctatagtatttcagcttcaggtcatctatgatgtatgtggacctctcctatgtttggcactgaaattgctatatttaacaaagcccctgggcgttgggtttttccacgttgtttcagattgagtcagctccctacagtataaatgcttctggttttacaagctgtcccaccctgttagaactattgtctgaaggagctggggtgagggagagtggtcacaatgccacatactgtcatcatttttacccaactttcagtagttttcttgaataaacacttctccatttgtcctatgttttggtcaatactcagaggtgaaaagtagttgtttttgataattttgtctaatttttttaaaagtctgttttttaagagcaattttagattcacagcagtactgagcagaaggtacagagattttccatatatcccatgctcccacacctgcatagcctcccctatcatcaacatccccaccagagtgatacatttgttacaatagttgaatatccattgccacagtagttgaatatccattgccacatcatcacccgaagttgatagtttgtattagaattcactcttggtggacattcagttgctttggataaatatataagaacacatatccaccattatagttgctgagtagtctcactgccctaaaaatcctctgtgctgtgcctattcatccgtccctatgccccaatacctggtaatcactgatttttaaaattgtctccatagttttgctttctctgggatgtcatgtagtcggaatcacataatgtttagctttttaagattggcttcgttctcctttgagtttccataatgtcttttcatggtttgatagatctgaaaataatattccattgtcgggatgtaccgcagttcatccattcacctactgaaggacatcttggttgctttcaagttttggcaagtacaagtaaaactgctataaacatcagtgtgtggctttttgtgtggacatacgttttcagcttctttgggtaaataccaagtggtatgattgacagatcatatggtaagactatgttttgtaagaaactgccaaaccgtcttccaatctagctgtactattttgcattcccaccagcaatgaatgaaagttcctgttgctccacattctagccaatatttggtggtgtcactgttctggattttggctattctaataggtgtgtagtggtaactcattgtcattttaattagcatttacctgataaaacatgatatggatcatcttttcagatgcttatttgccatctgtgtgtcttctggtgaggtgtctgttaaggactttggccccttttttagtcaggttgttttcttattgtgttcaatttaatacttatttgtgtatttcagataacaatcctttgtcagaaatgccttttgcaaatattttctcccagtctgtggtttgtctttatattctcttgacagtgtctttcacacagcagaaattttaatgaagtccagcttatcagtttattctttcatgaatcatgcctttgctgtcatatctaaaaggccattgctaaatccaaagtcatctagatttttctcctatattctagagttttgtagttttgcattttatatttaggtctgtgaccagttttgagttagtttttgtgaagggtgtatggtctgtgtctagatttgttttgcatatgatgtcaggttgctccagcactatttgttgcagactttctgctccattccattgccgttcctcctttgccaaagatcagttgactgtatttatgtagctctgtttctgagctgtctgtttcatttcattgacctgtttctctcttatcaataccatactgtctcgattgctgtagctttgtagtaagtcttgaagtctgaaaatgtcagttaactttgttctcctcccatattgtgttgggtattctgggtcttttacctctccatgtaaactttagaatcagtttattggtatctacaaaataatttgctgggattatgaatgggattgcattgaatctatagatcaagttggaaagaactgatatcttgacagttgaatcttcctgtccatgaacatggagtacctctccattgatttagttctttgatttcatttgtcagagttttgtatataagtcttgtacataacttattagatttaaacctaagtatttcattttgagggtgctactgtagatggtattgtgtttataatttcaaattccacttgttcactgctggtgtatagggaagtgattgaccattgtaaccttgctataatcacttataagtttcaggaggttttcttttttggttgattctttccagttttctacaaagatgactgtcatctatgtacaaagacagtttggcttcctccttccaaatgtgtataccttttatctctttttctgtattatcaaggacttgcaatatgaagttgaaaaggagtggtgagaggggatatccttgccttgttcctgattagtgggaaggcttcaagtttctcaccattaagtatgatgttagcgtgggtttttgtagatttttaaaaattaaattgaggaacttcaccctattcctagtttactgtgagtttttattattagcaggtgttggattttgccaaatgctttttcttcatctattgatgtgatcatgtgatttttttcttctttaccttgttgatgtgatagattacattgattttcaaatgttgaaccacccttgcatacctagaataaatctcacttggtcatggtgtataatataatcctttgcatacatttttggattcagtttaataatattttcttgagttttgcatctgtgtttattagcaatatttgtctgtagtttcttgtaatgtctttgcctgattttcatatggtaatgctgaactcatagaagtagggagtactccctgtgcttctatcatctgaaagagataggagagaattggtgtattttttttttttccttaaatgtttcatagaattcataagtgtatctgtctgggcctgcgctttgtgttttggaaagttattaattatttaatagagatagtcttattccgattgtctgtttcttctcgtgtgagttttggtagattgtgctcttcaaggaattggtccattttttctaggagtaccatatttgtgtgcatagacgtgttcatagtatttcttggttatccttttaatctccctgggatctgtaatgacattctctttttttatttctgaaatcagcaatttgtgtcctctctcttttttcttagttagcttgtcttactgattttatttatctaagaaccagcttttggtttggttgattttctctactgattttatgttttcaatttcattgatttctgctttaaatttttattcttctccttactttggaattaatttcctctcctttttctattcttataaggtgaaggcttagatgattaattttagatctctcttttctgatatatgcattcagtgttaaaaattttcctttaagcactgttttcactgcatcccacaaattttgataagttgtattttttatttttgttcaaaatattttaaaatttcttttgagactttctttgatccatgtgttacttagaagtgtgttgtttaatctccaagtatttgggagattttccagctatatttgttattgatttctagtttaattcaattgtgatgtgagagcagacactgtataattgctattttaaatttgttaaggtgtgttttatgaccccaagtgtgatttgtcttggttaatgttccatattagcttggaaaaaattatgtattctgctgttattgaatgaagtagtctgtagataaccattatatcaagttagtaaatggtgttaatgagttcagctgtgtccttaactgatcttttgactgctggatctgcccatttctgatagatgggtactgaagtttctaggtataatagtgaattcatctgtttctccttccagttctgtcagttttttcttatgtagtttgatgctctgtttttagatgcatacacattaaggattgctatgtcttcttggaaaattgacccctatgtaactgtagaatgctccttttttttcctgataactttccttaatctgaagtctgctctatctgaagtgaatataatgactctcactttcttttgattaatgttagcatggtatatctttctccatccatttactttcaatttatatgtgtctttaaggtttttgtagacagtgtatagttgggtcttattttttggttcattctgacaatttatttgtcttttaattggtacttttaaaccattggcatttaaaatgattattgatatcgttggattgacatctaccatatttttactgtttttatatttgttgcccttgttctttttcctgtttttgtcttccactctttttctgctgtttgggtttttttgtttgtttcttttctcttatcgatcccttgcctgttaaataccccttttgattttaattgagcattttttatgattccgttttctctacttagcatatcagttatactttttaaaagcatctttttagtagttgccctggagttcggaacatctacagctaatccaagtccactttgaaatgatgatactataccatttcatgggtaatgcaaatgccttacaacaatccttattcctcctctctgctgttccttgtattgttgctgttatttatttgactaacacatcagtatacataaacatgtatatgtacataggtatacaaaatcaaatgcattgttggtactattatttggaacaaattgttatctgttaaataggtaagaataagaaactaagtttctgttttacgtttacctcttccttatgctctttatgaagatccgaatttctgaactatatgattttccttctatctaaagaactcctttaacacttctggagtgcagtgccatgatcatggctcatggcagtctgaattcctggacttcagcgatcctcccaccttggcctcccaaagtgctgggatttcgggtgtaagccactgcacctggcctctctcctttattttcgaaggctatttctcaggatatagaattctaggttgatagttcttttctcttggtgctttaaatatttcactccactcttcttacttgcatgctttctaagaagttgggtataattctttcttttgcttctctataggtaatgtgtttttttccctctggtttctttcaggatttttctttatgaattcttatagtttgaaaatgatgatgcctaggtggaatgtttatcctgcttagtgttctctgagcttcctggatctgtatttggtgtcttataataattttggggaaattcttagttgttactgtttctgatatttcttcggttcctttttttttttcttctactgattttcccattttgcatatgctaccccctttgtaggtgtcttgcagttcctggatattctgttctggagtttgcagccttttttttttttctctctctctgtttccttttcagtttggaggtttctgttgagatatcctcaagctcagagattcctagctttattcagtctgctaatgagcccatcaaagcattcttcatttctcctgcagtgtttttgatctctagcctttctttttggtactttttagaatttccatctctctgcttacattgcccacttgtgtttgcatccatctagtttattcattagagcctttagtatattaatcatagctgttttaaattcctggtctgatcatgtcaacatccttgctatatctgtcttgttctgatgcttgctctatctctcaaatgaccttttttgcctttcagtatgcctggtgatttttccttaacagctgggcacgttcctgagtaagaggaaaggctgtaaataggcccttagtaatgtggatttctttagagttctatagtcctgtgatcaggtcttagtctttgagtgagcctgtgcctctagactgtgtacatcacatgtgcttctcatttcccccatcagccttactgaagacacgatgactagagggagctggtgtttggtatttctcttctcccacatggaaggcaggagctgcctgaggttatttcccttcccctaggtcagtttggccctgataaaaccccagcagtttatcttccggttaaatagtttctcctgcgggcaaaccttgttaagaagaacagagtgttttggcatgtttttaaatggttccttttccttttcccctgctgcaaacacagggggatagttctcagatacttgctttgagaacctggtagagctcctggaggtaaaactcacaaaagtatgtgtgccggggaatgactgagtccccctggaattttcaactcaagacttgtccacactgtgcagttaagttaattacagttcaggtttccctagcctgtcagttttccctggaggcctctgtctgagggtctcggctccagttacttgtgcttctctgcctttgcctgccggtcactccaatttcaggggccatgatagtttgccctgtggcttcactgttcttaactaagaattgatttttcagtttgtttagctgtttacttattaggatgtagtgacaacgtccaagcttgtatgccaggccagaaactaatagtccaactttatctttgctttttagggaaagtatttacaaaggtcctcactttgtcattcctctcaattacctttgaaactttttctttaaatgttaaattgtctacctgtgaatttaccatgttgagtgctcttcattattttctgtacattgaagttgccacctggttttcttttcctccagcctgtagaacttgctttaatcacgttttaaatggtccttcccgtaatgtgaagggcgggtgagcaaggcgctcagagccgtcgtggggaggaccatgttgcttccaagcatcctgctcaccagtacaccaggggttggaaaaaccacactaggcaaaggacttgtgtcaaaatcaggactgaaatacattaatgtgggtgatttagctcaagaagtctgatcatcgtatatcatggagtctggcaagatggcttctcccaagagcatgccgaaagatgcacagatgatggcacaaatcctgaaggatctgggaattacagaatatgagccaagacttataaatcagatgttagagtttgccttccgttatgtgaccacaattctagatgatgcaaaaatttactccagccatgctaagaaagctaccgttgatgcagatgatgtgcagttggcaatccagttccacgctgaccagtcttttacctctcttcccccaagagatttttttattagatatcgcaaggcaaagaaatcaaaccccttttccattaatcaagccatattcaggtcctagattgccacctgatagatattgcttaacagctccaaattataggctgaaatctttacagaaaaaggcatcaacttccacgggaagagtaacagtcccgcagttaagtgttggttcagttgctagcagaccaagtactcccacactaggcacaccaaccccacagaccatgtctgtttcaactaaagtagggactcccgtgtccctcacagggcaaaggtttacagtacagatgcctacttcacagtctccagctgtaaaatcttcaattcctgcaacatcagcagttcagaatgttctgattaatccatcattaattgggtccaaaagcttcttattaccactaatacggtgttatcacaaaatactgccaatgaatcatcaaatgcattgaaaaagcgtgaagaagatgattatgataatttgtaatttagccttgctgcatgtaacatgtatacttggtcttgaattcattgtactgatactaaacatgcgtgctggatgttttcaagttgtattttagaaaactttcatatttaatgagtaaatacaattaccatacttttcaattgaaatgaaggtttttcatcagccttaaaagtgtaagaaaaatcaagttgtcattaatttgaaaaaaataatgttttaaatgttggtgtgctagatcaagttctttcaacttttctctgaaataatattattttgcctttatatttgaaagatatttttgctaggtatagaatcccaagttgacaggttattttcctccctccctccctccctccctcccttctcccctcccctccgctcactcgctcgctttcttgcttgcttgcttgcttgcttgcttgcttgcttttctttctttctttctttctttctttctttctgtctctctctctctttctttcttttgagacgaggtctcgctctgtcactcaagctggaatgcaacagcatggatcatagctcactgcaacccttgggctcaagcagtcttcctgcctcagtctcctgagtacctgggactacagacacatgtcaccaggtccagctaatttttaaatttcatgtagagacggggtctcacaatgttgtctaggctggtcttgaacacctgggctcaagtgttccatcctcctgccttggcctcccaaaatgctgggattataggcatgagccccaccatgcatgacctggttttcttctctagcactttgaagatgttttcccttgtcttttgcacttcgtggtgctgtgttatcttttattagtcttatttcagttccactgtaggtagtatgcattttcctctggcaatctaattatgatatgcataggtatattctttgtgtttggtcttgtcagggcctgttgagtatcttggatctgcagatttagagttttcatcaaatgtggaaatattttggccatattttttccaattttgcttgggccccaatctctttttctcctgtttctggaacaccaattacatttatattgtatagttttttttctttttttttttttgagagcgagtctcgttctgtcacccaggctggagtacagtggtgagatcttggcttactgcaacctctgcccccaggattctagcgattctcctgcctcagcctcccgagtagctgggattacagatgcctgccaccatgcctggctaatttttttgtacttttagtagagatggggttttgccatgttcgccaggctggtctcaaactcttgacctcaggtgatctgcctgccttggcctcccaaagtgctgggattacaggtgtgagccaccatccccagcctattatatagcttttattgttccataaggtcaccgaggcttggttcatttttgtgtagtcctttttctttctgtgtttaattatggttaatttttattgatatatcttcatgttcactaaatttttatttttatttttttgtaatgtctgatttactcttgcacacatccagtaaattttttgtttcagatattatatttgaacatgcctacaggaatatacctgtatacctctaggatttccattttttaaataagatttttaatttctctttattatgttaatgattttctttaaattttgaagcatatttataatagctgttttaaagtcctcatctgctcattctatcatttctgtcatttttgtgtctattcctacctggctgtgggtcataatttggatcctattttcatgtttagtaatttttaatttgatgccagaatttttgttaatctttttattttggaataaacctagatttacggaaaagtttaaagataatgcagagagttctcatacgttcctcacccagttttagtgtcctctaatgtgaacacactacattaccaaggtacatgtgtcagaactaagaaattagcacaaggcaatactatttactaaagtatagactttattgaaatgttactagtttttctaccaatgttctttttcttttccaggattcattccaagatacctgttgtattttgtggtcatgtcttcttagtctcatcctatctgacaatttctcaattttttctttttcatgaccttgtacttttgaagagtattggcctgtgggtgttttacagaatattcctcaatttgagtttgcccagtgttttcttacaattagcctgaggttgtgagttttcaagagaataccatagatgtgaggtgtctttctctgcacataatatcactgcgttaatcttgattactttgttgagttggtacctgtttggtttctccactataagaccagtcttattttgcttggattccttctctctgtgctgtggtccaacaaacctctcaagacaaagagtgattataggacttacctcatttacttaggaatcttagtcttatatttcttggtcctagtgtctgaaaacacttgttttcagttttctagctgtttatggcagaagagcaaattctgtagccctgaatccttcaacactagagtcagaagtccttggcaggacctcttcttgagttccttgcttgcagtttctcagttaatttcatagcttgcagttcctctgatcttgacctacatgaaggccaactcacagctagcattcccaagggagacttgatatggtttggctctgtgtccccacctaaatctcatcttgaattgtactcccataattcccacgtgttgagggagggacctggtgggagataatttgaatcatggggactgtttcccccatactgttttgtggtagtgtgtctcatgagatctgatggttttatcaggggtttccacttttgcttcttcctcattttctcttgccgccaccatgtaagaagtgccttttggccgggtgcattggctcacacctgtaatcccagcactttgggaggctgaggtgggcagatcacaaggtcaggagttcaagaccagcctggccaacatggtgaaaccctgtctctacgaaaaatataaaaactagctgggcagggtggtgcattcctgcaatcccagctactcaggaggctgaggcaggagaattgcttgaaccaggacccaggaggtggaggttgcagtgagctgagatcacaccactgcattccagcctgtgctacagagcaagactctgtctcaaaaaaaaaaagcctttcacctcctgccatgattctgaggtctccccagccatgtggaactgtaagtcaaattaaacctcttttttcttcccagtcttgggtatgtcattattagcagtgtaaaaatggactgatacagtaaattggtaccagtagagtggagtgttgctgaaaagatacccaaaaatgtggaggcaactttggaactgggtaacaggcagagtttggagggctcagaagaagacaggaaaatgtgggaaggtttggaacttcctagagaattgttgaatggctttgacaaaaatactgataaaggtgtggacaatgaaatccaggctgacgtggtctcagatggagatgaagaacttgggaactggagcaaaggcgactcttgttatgttttagtgtaagagtctggtggcattttgcccctgccctagagatttgtggaactttgacttcagagagatgatttagcgtatctggcagaagaaatttctaggcagaaaagcattcaagaggtgacttggctgccattaaaggcattcagttttaaaagggaagcagagcataaaagtttggaaaatttgcagcctgacaatgcgatagaaaagaaaatcccattttctgaggagaaattcgagccgactgcagatatttgcataagtaacaaggagttgaatgttaatccccaagacaatggggaaaatgtctccaggtcatgttagagaactttgtggcagcctcttccatcacagatccggaggtctaggaggaaaaatggttttgtggagaggacctagagtccccgtgctatgtgcagtctagggacttggtgtcctgtgtcctagctgctccagctgtggctgaaaggggccaacatagtgcttaggccgtggcttcagagagtgcaagccccaagacttggaagcttccatgtggtggtgagcttgcaggtgcacagaagtcaagaactggggttttggaacctctgcctagatttcagaagatgtatggaaatgcctggatgcccaggcagaagtttgctgcaggggtggggctcttatgcaatgcagaagggaactgtgggatgggagcccccacaaagagtccctactggggcactgcctagtggagctgggagaagagggccaccatcctccagaccccggaatggtagatccacctatagcctgcactgtgagcctggaaaagctgcagacactcaatgccagcctgtgaaagcagccagaagggaggctgtaccctgcaaagtcacaggggtggagctgctcaagaccatgggaacccacctcttggcatcagtgtggcctggatgtgacacatgaagtcaaaggagatcattttgaaactttaaaatttgattgccccactagattttggacttgcatgggtcccgtaacccctttgttttggccaatttctttcatttggaacagctgtatttacccaatacttgtacccccgttgtatctaggaagtacctagcttgcttttgattttataggctcataggcagaaggggacttgccttgtctcagatgagactttggactgtggattttgggttaatgctgaaatgagttaagactttggtggactgttgggaaggcatggttggttttgaaatgtgaggacttgacatttggaggggccaggggcagaatgatatggtttggctctgtgtccccaccttaatctcatcttgaattgtatttccataactcccacatgttgtgggagggacctggtgggattgaatcatggggactgtttcccccagactgttcttgtggtagtgagtgtaagtctcatgagatctgatggttttatcaggggtttccacttttgcttcttcctcattttctcttgctgctgccatgtaagaagtgccttttgcctcctaccatgattctgaggccatcccagccatgtggaactgtaagtccaattaaatccctttcttcctagtctcaggtatgtctttatcagcagcgtgaaaacagactaatacaagactccacccttatctagagctcaggcagataggaacaagtttccttgctgtggttcgtgtttttgacagtgggaacatttgttctagtccagccgttcactctggcattctggcagcctttccggggtctggtcttcatgtatgatcttagttctaccatcttgttcgagctcaaggacttgccgcttatttcctggtgcttttaaaacataaatttcttggctaggtcccaggacagctctaacttgatgccagtggttttagctttttcttttccttcatttttagccactggtgatttctgttactttcatgcaagtaaggctctgtatttgagaagatatttattacattttatccagcatttatagcaggagagttggtggagtacactgtctgtagtgttcctaagcaattccttggtctgctgttctgctttataatggcttgaaacagaacacttaaggccagcttcagtttgtcccattgaaactttcatataaaaaagaaagctgtaattttaagttacaatttatttttatttttatttttttggagacgaagtctcactctgttgcccatgctggagtgtaatggcgcgatcttggctcactgccgacctctgcctcccgggttcaagtgattcttctgcctcagcctcccgagtagtagctgggattacaggcgtgcgccatcatgcttggctaagttttgtatttttagtagagacggggtttcaccatgttggtcaggctggtcttgaactcctgaccttaggtgatccacccgccttggcctcccagagtgctgggattacaggcatgagccactgtgcctggccttaagttacaattgaaaactgtaaggtactgtgctaagaaggccttcaagtaactgatcttcattgggaaggcaggttaagtgtataggtcgaaggagaataccagaagtgttccaggagctgtacactgagagttataacttgggagtcatagtatcttctttgaggtaagaaaactggcaactgcttcacgtcagaggaggtactctaggtagggttaaggatcaagtggatttctaggatggaaaaaatttgagtgttggggacagagatgatgaaattgaaacctacacgggttttatttatgccgtgttcgagtaataagaactcagagcctattatcagtaaaatgtatttttggagattacagatattttcttgggctccaagattttcttggtaatgtctatttgggatcttggaagctaaactgagggtaagaatggactgtcagtgatgatttgttggtgaatcgtatttgcaaagagggaatggttcagtctgataagaattgcaataaagacaaaaatgttgtggcttagggcagacttggctattctaagatacagagcggtgtctaggctagatccacctgtagtcacaaagacgtaagtttaatttttttacagttactggaaatctttcaaggagcacttgttaggagctaattgaggtgcaaccaaagagcagcactcagaacctcttcagaaaagtgaagtttgcaaatacttgcttgaaacttgaatgtgcttaagagcacggagccgaatgtgacctgtgcaggttttccacacggccaggactcagacctgtgtgtgtcttctgtgcggttgttgcacactccaaatctggtctgtgtgggttccttaataagaaagtcgctgtaggaaaagctgtccatgttggaactatgcaaaaatctctgagaattggaaagttttctggaaatctattgatttttttgaaaagtaaggaggtcagtttccaataacgatgaaagggaagaaaacccaaccaatgaatctatgattactaccacagtgggtgtttaaaacagaaatatttttggaacatgacattttatgttgcaatggaatcaactgatgagggcttgggatgggggattccctgatggttaatatcagattgactagggacattcttccacgccagccaatctcaggaacacgggaagacgtgagggctccacagggttaagtgtggactgcccatggaagagctgagggtttccctataattattcttcatactcttcatcttggtgatcattaacttggcatcagcaccctttgggggctatttgtccattttcagctgtttcctcttgaactataaaggctctctcaactttgaaatgtactgaccaggccacactagtaagttgtggagcctgaatatatggcagctgatgaatacaatgatgatggtagacatagccttccttacgacgggagccgcggaaaccatcagtcagtcgacacctttctggtaacctgggcgtggttcattacccaggtggcattctcttgctttggaaatttaaaaaatggcagatttctgtgtcctaatagtggcaaatgcagctgtttttgttgttcattttagcaaactaatgacttctgcaaaaagacgaaccaagattaaaagaaatcagatgtgtgtatttggtatgcaatatttttgtattacaaatagctacattctaacccacattaaccccatgatatgtgaattttgccaactcctgctatgtcttttaaatcaaatccggtaaatcactatgaatgttctaatttctaaacaaactagtcttccagtagaagtgctttaacactgtactgcaaattagacaacctaagataaatggaccatctttgttaattgtgtagtttaattgatcaaaactaccagataggatttttatagtgattttgcttagtatcaaattctatactattaaatagcttgtgagtcatatatttggggtcattaagatatatgctgttatttagcgtctgttaaccttattaagcaccttctttttggtctagttcatgtcacaatatgaaattgcttttaattgagatgaccaacttccattacattgttcaacccctgtacaaagcacttttcatttttgctctattgatcgagcagcaattgacttgaactatattcagaacctggtgggggaagatgggagaagatttcttgaaatgttctttttgctggtggtttttttctctgcataccccgctgtttgcttgtaactaattttgcatgccagtaggtagcagtggtgagcagaggcacagacagaaagctgccagtcagcgattataaattattattcatttctgttataggtggggtgtgcagtcagttacagtaataattaccaggactagagggtttcctaggcaaccaatttcccccctcattcatgctgttgctgagagagttcctgtaaagcatgacattgctgtattctgaggtttgttgcccccctgctgctccaggtttgaggttagttacagcatcataagacgctctcaagcatagagaactcaggctgggcttaaaaagcatgccggcagcagggcctctccgctgctgcttcacttttaagggacagggttccaaaaatgcaaatcctgcatcttgcttggtaacaggaagatctctttaagttgcagaaccttttattttttattattttgaagatagtggatcatttcatttttatagttttattatttgataaaaacgtgcagagacagacctaaaactagacttctccttaggatttgagtctaataaatcagtggggaactgtcacagctaatcatggttgtgtttgttgtttattcagttttatgaaaatggctcatgaagagaaaggcagcactcttcctgcagcagcagaattagtcctttatgtagtaggaaaataatggaaaccacatctattatccgggatctatacatgaatcatattatcctatatttgggggctctccaatctttcattttaatgaacttaacatcaagtgctttgcagtgataaaaaagtagtatttgtttgtgtctgctgtgaaaaaagataggggttcatgtttcagtcttacgtggagatgtgaaatgtttatccatttacaaggcagaagtcacaaacccagacacaaggcatccgatctcgtcctctgctagatgattacagacatgttcagtgcctcacattggacctgtgtatttatcaccgcaagttctcagcaggatgtaagttgtcttcgtcagtgttcttggtggggacaccaccagcgctaggcatgaccgatgagttccttgtctgtgaaccatgactgggctcttggacttctggagctgcttatacttcctgcaggtgcctgctgtgtattcaagggtgtggtggggaacctgcagtcaagttccaggagcagcgaggctgcatgcaggctggcttggtcctgcaagaggccactgctaacaactctatgcctttagccttccctgggtttctggaggaaagctgccttctgccctggacccagctccatcctgctccggaagtggccctagggtccagctgtgctgggcagtgagacctgccagtcaccatttgtccaaaacgtctcactgagaattggcttcccacttgagaaaatcttgaggtctaggccaggcgcggtggctcatgcctgtaatcccagcactttgggaggccgaggtgtttgggttacttgaggtcaggagttcaagaccagcctggccaatatggtgaaaccccgtctctactaaaaatacaaaaatttagccgggtgtggtggcgggtgcctgtaatcccagctactagggaggctgaggcaggagaattgcttgagcctgggaggcagagtttgtagtgagctgagatcgggccactgcactccagcctgggtgacagagtgagactctgtctcaaaaaacaaaacaaaacaaaaaaaggaaatcttgaggtccagtttcttgaaaacatctcaaaggtactaaacataagtgctcagtcaccctgttagatgtgggcttatggagtgattcataaaaatgaaatatggactatgtttttgatatagatactgtaaaatgtaattggctacatgaatccatcaggctgggttcatctgtagtttaggtttactttaaattgcttaataatctttttaaaagtatttataagccagaactatgagactagcacctgccagcccaaacagtattatcagggaatcccagtttttttttttttccccctgaatcgtttaacagcctaagtagtagagtgtctcttgaaacgtagcagtctgctatacttcaggtggggacttccacacaatttagcaaagaaaataatttttaaaaatgttcctattgcatactactctgtggcataaattatttaaatgcagtgcttagccaaactaatgttacagattagatgatgaactgataacgtcatatacagtaagttaaagacatgcaatgaagtcgttatttacttatggacaactacccttgcaaaacaaagtcaggaaaagtgggtgatgttcaaatgaggccatttgaactgtagcttcaaaataatcccctttaatttcattctctgcatctctaaattctggagaaagaaggaatgtcttcatcatcagaaggaccagtctcctgtttataaaatgataaagaaagttgggcagctcctccatcataagcttgctcttctggtttttttttttttcctttaaataattgaactgttacaggaaacattgttaaaatcttaaggttagggcatgctttcatttttttttgtctaaagattactctgcaccctagacaaaggaaatatttaaactgttaaatttgaacaaagatacagtctgcatatgacttctctgaagccctataaaaattctttaaaattgcctattcactcaaatttactgagtgtagcaaaaatgtcaaaggcataaagtcagagaagattgaataaaataatgcagaaagacagattagtcatgcacagacccacacagcctttcagagcacacaataccgctctttattaccgttctatctttacaaagactacgttcaatacatagaagatgatacatggccagccatgtcatctgcctgtgattccagaactcatctatctgggcccttttcacaatgacattgatgagagatcgcagtgttttcagagcattgttttatttatcatatataatggctggtgaaagaaataggaattatgtcaccgatagcacataaaagagttgcatagaagattctgtgacaaagtttggtaaaacccagaacaaggaagctcatggaaatgttcttttctctgtcttcccccactgctgtgtcttctccccctccgttcaagtcctccaaagatttgcacgctgataactgttgaaaaatatcaagaaaatgtttcatcaagccaaacgtcggggaccctgatcctttgttaaaaaaaaaaaactctttggcgattacatttttgtttaaatgtggagcacatttcaatgacggtagagttgccggccgttatttacgcatctgctaagggaaaggagactatttgtcagtcacagttttgtatcttgcaaatttaataaagagccgcccttaagatagaatttcttaggctgccacaattgacaaaagccagctaatgttgaaatgtcaacagcaaacctcatcagcaggcctcactgccgtgcaatcaagacagcgccatagctccatataaacaaatgtatataatgtgcctgtgttgggggtgggggtagggaaactggggatttcagtgctgtggggacacacagcacaggcttaaaacagtcccttcgacagcctttaaatgttaaggaatcagtgctgtgtatattacccagagagtctcagggagcgtggactcaaatgtgactggcagctgccttacaaaaggttatcttgcctgtgctccttgggaggactgtcaatcccatgcccatgggggaatttctcttccttccttccttcctttcttttctttcctcctttctttttccttccttcctccctcctttccttccttctttccttctttcttcccttccttcccttccttccttccttcctcctttcttctttccttcccttcctccctccctccttccctccctcgatccctccctccctttctttcttttttggagacagagtctccttatgttgttcaggctggagcacagtggcacgatcacggcttactgcagcctcaaactcctgggctcaggtgatcctctggcctcagactcctgagtagctgggaccacaggtgcacgccaccacatcaggctaactttttttttttaatcttttggtagaaatgggatcacactgtgttgctggcctcagactcctgggcttaaccaattctcctgcctcagcctcccaaagtgctgggatcatgggggaaatttctttaacttcctgtgcttttggtggtgtccaagagaaagctaaagaacaattttggggagtttcatgttttggagccatgaaccagccattgcactgaacttgaaagtttttcctcagaaccctgatctgggtgttcatccacagccatctcctgctttgctgagctgtttccttgtttgcagaaatcagcacagaaccacgcagaaggcagtgtggctgcggtgcaatgctgcatttggaagtgagtaaatggaagatgagacgtgcctgccttcactgtggggggaggatgagtttcccttgtccctgaggaagattggctttggtcctgtgttctccatggagagatcttgccttttcctatcccatcactatttcctttatagatggtgggctgaagacccagaagacctgcaagtgaatggaggctcggatccaaaagctaccccgagaccccagggtcttcactcctttatggcagtgtgagtggggcagacagggaagctaaggactccctgcttaggtggatggattcgagggatggagaggctcagaactgaggcccctgtgtttgtgctggccacagctctcctttcctcccagctcattgcaacctcagaaggcctgtcgagtgcctgtcagcctcctcctcctcctttccttccccctcctccttttctgtttcctcttcctcctctttttctacttctcctctttcttcttctcctgcttctttttcattgtcttctttcagctgctgcttgaccacccaagtcaactagggcaggacagcctccgcccaagctcccagggactccaaagctggctggtgcaactctcccaccctccctgtcctgcatggtgaggaaggcccagcacactcgctgtgcacagctcattgggtcctggaagacagaggcaagggggcagacccaggggaaacaaggcgtttttggagagagctgtgtgccatttatcgtctgcagccaggacacacgttttgccttggccatctttgagtcgctaggcagtgctcagatgcccctagatggtcttccctgcctcagagaaggctcctgcaggcagatgtccaaatgtttagcagagaggtggggttggtgagaggcagcatcctcatttgtggctttcctgccccaagaggaaccactgcttcttcagccttggattcctaacaattcatttaagggaggaacacttatttattctaaaggtttactgagccccgattatgcagtagacgctggggacagaataataaacaagacaggtttggtcactatctgcatggaacctaagagtctactgagaaaaatagcataatgcaaaatgggcccagagggtaatggggtgcggcgggggagttgggaagtcctctggaggaggcaacagttaccctgacctgaaggaggataggagcaagctgtgagggggagacagcggggaccaaggctcaaggcaggaacccctggggagtgcttggtgaggctagggtttagagcacaaggcagagagatagcgagaccatgggagaacctctggggccttgctggccaagggtgggatttattctcatgcagtgggaagcccatggcgggtcctgggcaggaagaactggctcgcattaaaagaaaatcactaggtctgccttcttcagaattgattgcaggaggcctggcatagaagcagggagaccagttattacaatcactcggtgagaggatggtggggacagtggagacagagggaaagcacacatgtcaaataccatacggattcaggactgatgggcacgggggagcagggcgggcgaggaccattgctaagccctgagatggaggatcctgtggagaggctgcagggactcggtgacacctggatactcagaaaagaaagggccccacgagacattccgcagcctcatcccaacctgaggagagatccacaggggactcacactcctgtttctacctcacaactcacacccaggcctggcacggtggcatgcacctgtcatcccagcgcttcgggaggctgaggtgggagggtcgcttgagcccaggagtttgagaccagcctggacaacacagcaatatcccatttctacaaaaaatttaaaaatttatatctatgagtgtgtgtgtgagtgtgtgtgtaaaacaaaagatccaagctcaaccctgttttgttacttttaaatttttttttttttttttgagatggagtctcactctttcgcccaagctggagtgcaatggtatgatatcgactcactgcaacctctgcctcctgggttcaagtgattctcttgcctcagcctcccgagtagctgggattacaggggccagccacgacgcccagctaacttttgtattattagtagagacagggtttcaccatgttggccaggctggtcctgaactcctgtcctcagatgatccacctgccttggcctcccaaagtgctgggattacaggcgtgaaccaccgtgcttggcctactttttaaaaattttacagccctgtttttggccctgccccttcggagctccctggcctgcttggatctgcttcctggatgaagtggagcccaagtgagacgtttcagcccgtggagtgggtgtgctgcgtggtgatactcaacacatagaggacattgatgaaacacggcaccgtggcccctctactgtgtttgggaggcggtgtgtgtccgcagagtaggtggtcactggagtcatggaggccaggggtgggcagaggatggggagagggaagcaggtccctttggactgaagtggtcaaaggacttcgctgagagggaggaggtggtgggcaggctgcggagggcagagtggcgggctacgaagcgcgcagcagggtcacacgagtgacgcccggggacaggtgcagaggggccgggctggctgcttccgaggaacagggaatgcagtggcaggaaacgctcgtggaagtcacataggtcagcccactgaggccacgggaggcgaagccccacagacggcagacagccctactctagaatccaggcttctgatcactatatttttcaaaaataagttgtatcagagatggagagatgatgttcccggtctgttagttgcgatgtgacttacaacagtgaaaaattagggacaatccaagtgtctgacagtaaggaactcgttaagaataaatgattataaaaatatgtgaccattaaggttttttaaggactttaaaaataacactggctactgctcatgatttatttaatattttgtgaaaacaggatatgactaccctattttgtgaaaaagacccaaatgcaaaaatatgtaactgtaccagtatgttttagagtggatcctccagagaagctgaaccaataggatggagatctctttctctatttatctatctaattaagtatgtatgtattatgtatgtatgtatctatctatcaaatctactatctatgtaatctctatctatcatctatctaatctactatctatgtttatctatctatctatctatctatctatctatctatctatctaatctattcatccatctcgaggttgattttaaagaattagctcatgcaattggaacagctggcaagttgaaatttacagggcaagccggcagcctggagactcagggaggagttgatgttgcatttccagtccaaaggttggctggaggtggaattccctcttccttaattctgttaagatctccaacaactggatgaggcccatcatattatggagagcaatctgctttattcaaagtctagtgacttcagtgtttatcacttctaacaaataccttcaagacaacatgtagactgatgtttgaccaataactgctaccatggcctaccctagttgacacatgcgattatccattactgatcaaccccagcttctacttttgcttttactttggaggagaggactagaaagaagactgtcagaattcattggtgggattctcaggtcacttatttacatttctgtctaccttcccaactatctgataaacatactttaaataattttagtatataaaatataaaacattacaataataaaagtgttctccttgcccatctgaggaaactgtcctttcaatatctgcaaaagggccatccttgtttgtatcaattgctcctctccataccctagccatggtatcgtttcttttattatctctcaaatttaccttttaaaattacagaatcatatcatatgacaggaaagatgaaaaaagcaaaaatcacctgcactcccaccaaatgatcggcattgtagttttattgccatttcgttttagattctttttcacagtgtgtatatgtacaaaacaccatcctacttttggaaactttttaaatattccatcgcatgacggtaccatatgtttactcagccaatctcctattgttggacactaatgttctttccagttttctgttattagaaacaatttggtcctaaacagctttgtatacagctctttgcacacatctctggttattttcctcaggattcattcctagaagaataattgctgggccaattgtacttttgaaaaattggacctgagtacatagaatggctttatcacaatacttggttcacatacagtcttccttgctctatgcatggcccatacacagtataattatttaaatgatactttctttttgtttttgagacagagtcttgttctgtcccccaagctggagtgcattggcacaatcatgtctcactgcagcctcgaacccctgggttcaatcgatcttcccccttcagcctcgcaagtagctgggattacaggtgtgtgccactacacctggctaatttttgttttttgggattttttgtttttgttttttgttttggtagaaatggtctcaaactcctgtactctatcagtctgcctgcttcagcctctcaaagtgctgggattacagccaccatgcccggcctaaatgatacttttttttttttttttgagaaagagtcttggtctgttgcccaggctggagtgcaatggcgtgatctcggctcactgcagcctccacctcctggattcacccgattctcttgccacagcctccacacagcaccaccacaccgtctaatttttgtatttttagtagagatggggttccaccatgttggccaggctgatctcaaactcctgacctcaggtgatctgcctgcctcggcctcgcaacgtgctgggattacaggcatgaactaccgtgcctggccctaaacaatacttttaataacataagcccatcacccaaaacacaaactaagaacttgacgataatctatggctccccccttctctatgtccccacctctcttacccaaggtaaccatcttctcaattctctgttcattcttttgcttttctttttacatatttctcttgtttctacatggtatttcccaaagcatgtgttttcatttagttgtttttaactttaaaaggtaccatcttgtatataaattttgtgacttacttttggaattaatatgataatgctgagactctttcatattgttacatctcaacattgttcactcaatgtagtgttccactgggcgaaaatacaagctagctatcttgtatcttgtagctcctgttcaagggtgtttgagtgtttctaggatcttgatatcatgaacggtgctggcacagcattcctgcatgtctctccttttgcacatgtgcaagatttcatcttgggtatatacacataggagtggagttgctgtgaatattcaactttaggagataatttcaagctgtttttctaatgtggtgagcctctccaacaacgcataagaaattctgtggatccatatcctctccaacacttagtgttattagactattagtatttattaatcaaataggtacaaagtagtctctcattatggtcttgattgtatttccttgatcaccattgatgttactcttcttttaatatggccatatttatttactcttctgtgaaatgcctatttatgtcccttgcctattttttcattgtattgcttatgttcttattgatatgcagtccaacttttttttagttggagtcttgctctgtcacccaggctggtgtgcaatggcacaatctcggctcacgcaacctctgcctcaagcgattctcctgcctcggcctcccaagtagctgggactacaggcgtgtgccaccacacctggctaatttttgtattttttagtagaaacggggtttaaccatgttggccaggctggtctcgaacttctgacctcaggtgatccacctgccttggcctcccaaagtgctgggattacagactgggattataggcatgagccaccacagccagtcccagtgtatttttgatattaatccttgtcagttgcatgtgttgcaaatatcttgtgacttgtctctactttctgagttgtcttttgataaatataaagttcttaattttaatatagtcaaatgtgttaatctttttctttatagtcactgatgtttgtttaaggaaatctattcttaccccgaggtctaaatgatatttagctatattttctactaagaagtttaaagttgtgtttttaacatttaagtctttaatccatctggactagatttgtcaacatcgtgtgaagagaagatacaatttcttcttttcccagatggctaatcatttttcaacttcacttcttcaatagtaaattttgtttgtttttcccctactgatctgacatataacttttgtcacataccaaatgccataaaccttaatgtgaggttccctttctagactatctctctgattgatttctttttccctgcactaatatgacactgtcttagttactataggttcatgctaagtcctaaacaaggtgaggaaaggctttcctccctccttttcatcttcagaagcatcctgcttattcttgcctgcttgctccatatcatttaacaagtttctttaaaaatctctgttgggactttgaaataatattgaatcaatagatccgtctggggagaattgatatctatataatgttcaactttcctatccatgaatatggtaaatttttccatttaggatttctccgagaactctcagataaaattatataattttctctgtagagattatgaacacagtttgttagattcctttttttttttttttttttttttttttttttttttttgagacagagtcttgctctgttgcccaggctggagtcatctcggctcactgcaagctccacctcccaggttcaagcgattctcctgcatcagcctcccaagtagctgggattacaggcacgcaccaccacacctggctaatttttgtatttttacggggtttcaccatattggccaggctggcctcaaactcccgacctcgtgatctgcccacctcagcctcccaaagtgctgggattacaggcatgaggtttgttagattcttttgtaagtacttgatattatctgttgatgtggatctcattgccaggtagctcttctagctgcttctgtttattctccttttctcttagcagagtattggaatgaggctgttgagagctgggctgaaggaatgttttgggaatggatggtctggcccatttgctgttgcctgagcaagctggtgaggatctctgctctgggctcatttgggaggagagcctctccttttctctggggaagtgtcgtgggtgccctgggtgaagcagggaggaactggtgaagggagaaacacccagctaggagacactttgtagggaggaggtaggggctcccaagattcatgcttgagtactggccctgcagtctaccagctgaagacttcaaaaaaagacttaacctctttgtcctctattagcaaaggcgctcaaaggtgaggttcacaggaggagatttctgcacagagtttagaacaatatgagggattttctttttatttccttaccagctgagattggtgagccattcacattgacagaatgctcatgacaaatgaacaaccacagaggcaaagccaggctaaaaatcgtcacaaaacagaacagatgttcccaccctctgaagacagagttgtagtttcataggcctcaagatggaaagattcatccggggagcataaactaaggggacactgagcagtgccgcttctggggctttgagaaactgagtactacttgttcccttctatggcagaatgctaaggagaggagccgtcattgcaatgtgaatagaggcaactgggaattgcattaaagggacttcaaggatctcccagcttcattctgcggacagccaatgtagaaccctgcctcagtcccaatctatgtaacattcatctctaaccctttcttggcctcgtggtagctttcctccaatactccaattggggcctttgccatgatgacatcaggatattttttaagttccccttggattgcatcgaggcttctctatgttgcttgagaggggctgcccatcttgcaaactttaaagcacagtgaaaacaaccttccacaagctcccggaaactccctgatgcctttctctgaggtaaaggtctttagatggtacctagttttgtgttagaagctttcacaccaagcagccaaaaaggctccatcctcacctgatttgtggtccccagaaaggagcctgcattaggccgataagtcatcatccagagaggtgatgacagtcgtctccatgaccattgattaatgaaaacagggctagttggacccagagtagatggttataaatggtgctgtcagagaaaaataattattgtattaataaggaaacagtccaaaaccaggctctaaaaaaagagaactggcaacttagcatctccatggatttctgaggcagacttgacggaatagtggggaggttgggggaaggtattctagctcccccaccacccgcctctccagaaggcagcccctccttgcctgtgcacgtgcccacgtccacgcgtggatgcgcggtgggtgcgctcgacctgacccagctctcccgggatgcggcagatgagccggggttgcgtggaggctttcggtaccacttccagcaggaacggagaaaaacgagcatatcttattgtacctgaaacactctatgatatgtactaaatattatgactactcggggccttgcaataattgattcacccacacagccatttagtctgcgagctgttcgttttacaaattctacaatcttttagaaattctttcagtgcggaagattgctgcctggcctcagattcattatggtgattgaatcctcttcaatagagaacggtttaaagagagcacaggccccgtgcgtctcactcagagttaaggcgcataggttaaaagcttgtctggtggcataattcactgccgctatgccaaacaatcacgtcttattgtgaccttcataagatacaaaaaggcaacaggatagagcttggcttttttttaaacccactcacagatttagcttcccaacatctgaagcttggagaattcctaattaaataaccaattaataatgtagaatagaaaaagctattttttttctgaaatgcaaaatcataattaatcagagtacaaaaagctgcctgtctttatatcagaaaaatatagactaggtatttaaatattccaccacacctgaaccctggccatccgtcattgctatgacttaaaacatctcagactaaattaggttttgtttgtatagagcagtgaaagtcagatggcttgaatgacaaaattagaacatgctcaaatcactgagacaaaaccgcataaagagaaagatgtgcaggaaaagggctgccagtatgaagcagaaatcttccactgatttttttttttgaaaaaaaaaaaaaaaaagcgttctttcctatttacccaaccacttggtgtaagtataaatttttgacccccaggcagacattccaggaaaagaaaaattatccccacccccttgtcaattgcccaaaatagcatgcacagctctaaacaagtaccctccccatcacgtcccccaccccagtttctccaccccgggttggccctggccctggtgtctacaccctcagcagacccgcccaccgctccagcccacgcccagcccccgcccactgatactgtcagtaacaccagacaccagccgctaaggttctccccccacccacccgggcactccgcaccacctccaagcgcatttatagttggaaagaaaagctcatttttataggtggtgccacctccacaatttatactttgcccatgaaataccaaaaccagggagtcaattttccaaggaagaaattttataaaaacacttttattgatggaagagatctgcagagacggtcgccatctgcaaggaagcgaaggctcttgcaggtgcgggttgatccagggctgcccaagcgtccctcactcaggaccacgcgcccaggcactaagcatgttatttctgtgtcttccgaacatgctaagcatttccttaccctccggcttttgctcctgccgtttcttcctcgtggaagtgaatatttgaaacctacctggtcttcccaaggtggcccagttattactgtgtgacgacttcttcctggcttccctggtgaaaagctgttccgtcctgcctgcaggtccctgtgttactttgctgatcacattctccctcgtgtctgtgggtgtggactctacccatgacttccctgtcacctgggggccggtgccctgagcccaagccagccctgcatcggggctgggcacagggtgtactcaggcgatggtggggccacagtgcaggtttagaggggccctctctccacccacgatgccaccagcctctgtcccaccctacgccacaaatctccttcaatatataatttgctgttatcatagcaataaataatttttggtgacgtttttactgttgagactttgtgcggtgtttttttattgacaaaaccgctatgaatcaacatgaacacaataaaaacgtgagagctatctgcattacggctgaggttttgtcaatagggcagtgcattgatctccgttcctctttggggttatttgtggagcttcagcgggtgggtttaggagctacagtgctcaggaggtgcagccccgggcctggcgtttcctgccacactcccctgggcactgcctccctgaagatggcacagccacagagaaatctcagccttgcggggcaaagggaagaagacagggagctgggagagagtgtgctcacctatcttccttccttccctcccttccttccttccttccctccctctttcctcacctctcccttcctcctcctttccttccctccctcatcaaccaaagcaaccagtccattgcctggcgcatcaggagctgtgtcctgggggcctggggatcagccctcgccagctctcagggtgctcccatctggaggaggcacagacctgcagacaatgggtcctcctgatgggcaccgtgtcccagggggtatgggggtcagccctggccagctcacagggtgctcccatctggaggaggcacagacctgctgacagtggccccttctgatgggtgctgtgtcctgggggaatggggatcagccctggccagcttgcagggtgctcccatctggaggaggcacagacctgcggacagcggcccctcctgaaggggggtgctcaggcactcaccgccaccattgaccgagtgcctcctgcacaccagacttgggctggggtctggctgtgactgcggtccctgctgtcagagcagggcatggagggcaggcgacgttaaaaacataatcacccataaaagcctgttgctccccagagtggtgaggtatctaagggatgccccggggtgctcttagtagaaagcggggggtctgccctggtcgggagtgggaaggctcctagatgtggtgtctgtaccaggctcacaggagcctggagtgctcctggcaggcacagcacctggaacaagcccagtgccttcggggagctgcgaggggggcctctggctggagcaggtcagggcaggcgaggaacagggagccaattgtggtcaagagggtggggggtgaggctgggacggtttctaaaggggctggggccctgagtttttccgggcagcaggagccaatgtgacagggctccatccctctgctatccccacctagccacccccttgctgccaccatgggcctatcctctccgggatcccttcagaccatccctgcccagacccagccctgggttaccctccccgccaccctccaggtgggagaccaggcctgtacaccctccagggcacacgtctgctccccactctccccccagggcctcgcaggggagcctgcccagcctcacctgcccacaggcgggaagcacaggggactgtccccccatcacaccatccctgcactggggttgcctcttgcttacagcccccatccaaatcctaccctctatggaggcccaacagaaccaccctcctccaggcagccttcctggattgtgctgccttcagggcagggccaggaaagccaagactctagggagggagaaggggcctgtcgccagtggtgtggtccccaacctgcccaaggccatcagatccacctccctccctccctccctctctgtcatttttagggactgggcttgccacactaatgatgtctgggggctgctggttcatgtccccagtttagtgaggaaaacagaccctgacccaggcctgggggtccaagcgaggggccagcaagggcagggtagagcgtggtgtccccacagacccggggtccctccggagttcagcaggctgtggagtcgctggccagccagccatgaatccctgcacagtgcctgtgcaagtcacccacttgcctgccctgtcacgatgctccatgaggccgggtccgctttttctgggagttatcactgtccagcttggtggtttactcgtcctaggtctgtctcctccaaccagaccttaagctgctgggagcagcaggagcagggatgtcctcctggaaggacatgggcacaacggacaatctcatcaggagagaggggacttgcagtggcacctgcatggaaatcaaaagagcaccagctgtgtgctgcagaggagggggtccctccaacctgctccacttcccaccccccatcctgtctgtccagcttggcactgtcttgcagcacctagagacgcaccggcccaggatcagccaccaagcacagagtagcactcactgaagatccaggcactttttggggcacacatcaagccaccccaggtgggggtcttcctacttcacccgcaagggtaaggcctgccctgctgagggtagtcacccttccccagtcccccgggagctggctaggaaagcagggtttccctttaagggtgatgcctgcagcagccactgtggcctgcctggcccagcccccaccccgtggcacctgcccacgcggcacctgcccagggcggcccactgtgctcccggcagccctcctgacgtcaacggcagccgcggggacgctgcctcctctgccacacgttgctcacaaagtgtaggcaaaaggcaggcgtccaattgctgcggatgaggaagagaaataatttcgtttctaaatcaggactcagtaccggtggccaggccccggaaggggcatctgtcggctgcacggcagccactcctgcaatggaggagatggtccagttctccatggggacttggggggctccccagctctggccctgggtgccgaaagccctgagaacaagccatctgaaaattaggattctgcgtcgcctgtcaatccccagaagcccacagcctttcattaagatccgcctgacatttctgttatgctcagaaatcccgaagacatgccaagtgcctgctatttgccatcacatccgcctgggaagccacggggccgccaagcccattgtgctgaagtgccccccaggaggggggatggcaggacacgcaggccctggcaggggcagagggcggcctgccccaggggcagctgacagagagcccaacctggggggccctgggccttgggttcatgccctccagggggccgtgggcagcttctcctcactcacattccacgagggcgtctgtgtccacagaagctcctgcaaaaccaatcaggagctgtgacatccctcaagcttgcatggaacccttctgtgtgccagtgctgtgtgtgccccggggcaccaaggcctggtttttggactctggggcctcacgtctaggaagggaggtggatgtggaacaggaaatgggtgagagaaaagtccaggtgtggggggaggaggcaggcaggctctgttggatcaggggctttgtggatattgaccattgacccgggcgtctcagagggaggacctgtcatttggccagcatgccaggagtaaatgtgcctgaaaggtcacagagatcatagaatgtgtgctatggaaatgcagcctctccaggaaggttggggcaagcctcgggaagggagggaaggaccacattgtagagttaggtgatgtggtcacatcttagctctgcaaccaggtaccacggggcagtgtaggacaaaccacgcctctgtagcgaagtgcatggccgtccccagaaaagcatggggtagcaggaggtatgtggagggaggagggccatgcagaggctgaggaggccagtccagcattgctatgggactggctgtaacactttggattgaaaaaacctgtggtcattcaggaatgcccataggacatgagtgagactggccctgaggcctgtatggttccaggagtctgactgcaagtgacataaacccaggtttctgcctccaccaaaaagcagaatgtattggttcatgtaccatgttgccttcaggcatggctggatccaggctcctaaagagtgcaattaaggttctgcttttcttgaacagtcttagctctgccttcctctgtgttggctttattctcaccagcaactaccagcagcagctcctatcatcttagcaacccaaggacaattgctcctataaaagtcacaggtaaggctttgttggctgggctccgggcatgtgcctttctctgagccaatcactggccagggcgatgtggtgctctgattggttaatcctgggtcatgtaaccatcccacagagagtgagctgttgcctgaagaagaggcatgatgtgggactgggggatggggagggaggcagagacaatagaagtcactgtggcttccccaaagcaggtcacacattcatcgtgcccttgagcttccacacttgtcctagaaaccttgctccttctagggtcttctagcctcatgcagccaatcccagtgaagccataagcatcacataccctgtccccaagccaggctgagcctggggaatctggatgaaagggcaggtggagcccgagcatcagctcctcaccccggtgcaggagctggtgagcccaggacaaggaagaaactgaggtgaggctatgcagccatgctggctaatgcctgcagtgatcaggataggcttcctggtggaggtggaagctggagacagaacatgagaggtggacagaatatggcagacagtcccattttcaaccttccccaggagagtctcttgcacaacctggaaagtgattgggctcagaccttcacctggaacccaggtgcagccatggggctgaggtgagacagtgagaagcaagtgcagaggccctggagcttggagtggggtcccggccagctgtccctccaagggcgattgtgggtgctgctcacagggctctgtgtacccatggggtggtgggccctgcatggcgccctcagagctcactccacaggaccagccatgaggccatactttgccttgcccacctgctgtttggagaagctcgtggtactgccttggggcgaccaaacccccacttcctgtgacacagcagctgagggacctcaggtggcttaaacagtcaggcttgatgagactgagtaactacctcctgccaggccctgggagaagagagaccttctaggaaacctcccccaaccctggccaccttccatctcccttaccaccccggccacctgggagcttccagtcatgtgcatgagatcaggagctgtgtgaagcaaagggggatgggaatcacacctggtctagccttgcagggtgtggggcctggagctggggaagggagaaaggtctctggagactatgccttgtcaccacaacccctgcactctgccagagagtctattcctggaaatgaaatttcaaatctgcactcttaggcttcccatttctcgagcacccctggctcaaggcacagggatcccatggagcagtggttcctgcccctggcctcacctttggcaaggagagaagatggcaacaagcccaccaccatctgagagcatgcagagctccgggtagggagaggcccaggaagctttctgagaagggacacacatacagtattagtgatcccagtgtgtgggagggtggggaacaggttacgaaagtgtgttgtgggcagtggcaacagactcagtcaggctgggcagagggatcctggagggcagtcaggggaaggcaagacacagaggcagggcttgactgggaaggcctggcatgccagacgaagctaccaacttcattccgtagctcgcacagcaggagaatgaaaagataaagcaagtctccagaaaaggaatctggccaagctcactgacccctgccatccattcacttatctatctctccattaacccattgatctacgtatctatccatccatccatccatccatccatccatccatccatccatctatccatccatccctccattcacccatccacttacctgtccatccttccacccatctatgcacccaccctatgcatccatgcacccatctatctatccattcatccatccatccctccatccatccctccattcacccacccatctacctattcatccatccacccacccatccatctacctatccatccatccatccacccatctatccctccattcacccatccatctacccatccatccatccatccatccatccatctatccatccctccattcacccatccatctacgtatccgtctatccacccacccatccatctacctgtccatccttccacccactcatctatccctccattcacctatccatctacctattcatccatccatccacccatctatatatccattcatctatccatccacccatctatccatccattcatccatctatccacccatctgtccatccatccatccatccatccctccattcacccacccatctacctattcatccatccacccacccatccatctacctatccatccatccatccatccatccacccatctatccctccattcacccatccatctacctatccatctattcacccatttaactatttattcattcacccatctatccacccatcctttcatctctgcatctcttcctccatccatcatccatctatccatctcatcctttctctattctctccctcacctctctccctttattcacctatctattaatccatctacccatccctccctctctccatccatccatccactcatctattactccatccatttatctatccacccatttttccatctatccattcatccatctacccatctatctatccattaatcccccatccatttatcacccatccacacattcatccatccactcacacacccattcatccatctacctacccatctatcctttcatctctgcttccatctgtccatccatccatccatccatccatccatccatccatccatccatttgtccattcatccatccacccatccattaatctatttatccatcccttcattcctgcttcccttcctccatttatccatccacccttccaccactgatctacccattcattcctcaatccatccacccatcccaagagttcactcactggcatgtgaccttttgaaggtcttagtcaatggggtctggggcctgaggacagcagactttggcctctgagcatggttttcacttttgttaccaccctccagccaggagactgggcacgtggaaagccaaggactgtgctgtgtggcagacaaacctctcccctcaccagctgccaggcaagggtggcactcatacctcagctggatgatgcaagaggaaaagctggaaacaggaccctaatcctgaccaggctgggtgggcagggtagggggcctgtgttccctgtcagttcaccctgaccacagaagacgacatattctcatggctgtgcccaaatggagtgagtgtcctgagacaggacagttggaggacagaggatcacttctcccctccctccctttgagagttattagacaactcccctgtgccagaccctggtaatacagtggtaggcaaataagactggccctgtccctgggagcttgtagctcagagagggagataaacagcagtcaataatcacccacctttagttctgccctgcaccaggcctgctcatgggcagacactcagggaaggaatgaaggaaggaatgatgcctgcccagcaggatcagtggcatgtggcagcctctccatgtgttatccactctgtgtattatgggttgaattacgtcctcttcaaactcataagctgaagtcccaaagcccggtacctcagatgtgacctcacttggaaataggatcatgcagatgtaattagttaaggtgaagtcattctagcgacaggtggcatccgagacacatgcacttcatctttgagggcaggggcaggcctagcaccccacctttaaggacagggaacaggctcagcaccccacctttgaggacagggaatggacccagcatcccaactttgagggcagggatgggcccagcaccccaactttcagggtaggaggtggaccaccttatctttgagggcaggggatgtgccccacctttgagggcagggatgggcccagcaccctatctttgagggcagggctaggcccagcaccccaattttgaggccagcacagggcgcctcctcagctaaggggccctcgccggccccctcctcccagcttggcctcagagctgcaggaaaagcctgcccgggccttgtttatttttggagagttttaactggttgggcgaggaagtgagccttgttaaaagggatttaactgtgggtcaccgcgagtttgaggggcttaggaggaaagaaagaaagggcttttcccttcatcttctccggagcaggggccccttcctcacaaaggcccggccggagcggggacctcagtgccagcccagctggagggagcgttaatggggagagcttaagtcactttgggaacaggaaaggtttctcagcggcaggaaagaaaggcctcccagagccagaggaccgaggggctggacgggaggatctcctgggggcttctttcactggcccctcgagggagggcttgccctctgctctctgaaacctggagacagctcggggctctacagcacactcaagatccacccaccaccccaaatgaaccccaggaacgcggcctcaaggcccagggggctgcagacacaccactgggtctttgctcccagggagccctgtccaggggacgggaaaatgacccacagcccggcctgggacctgctgttcagggtcctggagatgccgcaccacacccctgcccctgccactccctctgtgactgaggatgggtccgtttctctggctgaacctcctctgtgtggggtcctggggtgctgccactcctcaccgagggaggagaggcgtcttccgcgtgccccgaggtccaccttcttggtcattgtcggcggccctgttggtagcttctccatcacgccgcacaagcggctgagtcccaagatgaccttttaccagagcgggtagagttcacagaatcggatcccatcctggcctagcagagcgttttattattatgggaaacagcagaagtgggttggaggggggtccatcatctcctgcaaccagataaaatagaaacaactaaataaagcacccttgccgctcaagggaaaaattatgcttgtcaattatgatttatgagcgattgccaagcggggaatggggcctgcccgccttggaggccactctctgcctccccccagcttggtgggtgaggctgggggtggcgaggctgtgctgggagaaggtgggtcctcctgcagctctgactgttaaccccttgttgcctgcaaggtcagtgcccggctgctagaggggagggaggggatctcgtgcccccgatctggcaccggggtgggcagggcatatggacggcagccattggcgaggtgcccacaccaggccctggcttcgggcccagcatgagcctgggccggcggtgggtaagctctctatccctctctgccctataaaaatccctggcagagcctccagtccatgcccgcaccgcctccgcgtcctcccgggctccccgtggaggggcaccaatttgtcctcgcctgcgcctgctcgggccagatggtgggtatttccaggccacaaagtcctctgacctttgaacagttgccgccgaatttcaataatgaaagggccttttttgaatatgtacaaatgagacgttatatttccatacattttatttccagcctcatctgcgaatctaatattgacccggagttatctgtgatggggaagttattaattctgacagatataagggagaagctaatattcgccttttacaaacacctaatattaatctcaggcgctgtaaacgagtcccgcacgccggcatgggggagatgacaccagctcggaatttgataatgaaaaacggggaagtttaatttcagggaatggataaaaatgtttgcccgctgagaggtgagcagcgccaaaagctctgggagggcgggattcccggaggacagggtggaggtctgggaggtgacctccatccgaaggtctgcgatttggggcatgggcccaggtgccggagagggaactgaggttggagccctccatccctgcggccctcactgttcgcacctttaggagctgcctctggacaggtctctgcccattgttttgttcagagctcagccaaggacttcttacactttttgtttgtttgtttgtttaacattccatggtcctgtctgctcttttttgcctcctccgcctcattcggcttctgggtcaggcatctgttgtaggctgccgtactgccacaggttgaatcatgtcccccaagcttagatattgaaatcttaatgcccagtgcctccggtcgtgacctcatttggaaataggatcattgcagagggaatttgttaagatgaggtcaccctggagtagggtgggctcctaaccgggtaagatggtgttcttatagaaaggggaaagttgaggccgggcgtggtggctcacgcctgtaatcccagcactttgggaggccgaggcgggcggatcacgaggtcaggagatcgagaccatcccggctaaaacggtgaaaccccgtctctactaaaaatacaaaaaattagccgggcgtagtggcgggcgcctgtagtcccagctacttgggaggctgaggcaggagaatggcgtgaacccgggaggcggagcttgcagtgagccgagatcccgccactgcactgcagcctgggcgacagagcgagactccgtctcaaaaaaaaaaaaaaaaaagaaaggggaaagttgagctgagcatggtgactcacacctgtaatcccagcattttggaggctgaggcaggaagatcacttaagcccaggtgtttaagaccagcctgggcaacacagggagaccccatctctacaaaaaataaaaaaaattaactgggcatggtggcacaaacctgcagtcccagctattcgggaggctgagatgggaggattgcttgagcccaggagttggaggcttgaagtgagctatgaatatgcccctgcattccaggactggagacagcacagttttgttgtttaaacctcccagtctgtggtactttggtacacaagcacccaagcaggccgatacacccacgtctccttcatagcgcttgacaccacagcaattatgcactgagctgaatgagttttgtaaactccacgagggaagggacaatgtctgcagttgcctgtgcactctgccatatcccagcaccaggcacggtgcctggtgtatcctagatgcccaaagagtggctgctggatccatggctgagtaccttgctatctccagccagaaatacatccgtaagcactcactggtggatccctcttgtatgcccaggactgtgccaagggctggctgtgtatgtggggcacacccaaacaacctgcctcagcacgtcttgatggaatattatttttatttcctgcagaccgtgggtgctaggagttgggtgagatgggggctttgccaggggttgggaaattcagaatggaaccctgaaggtagccctcaccttggcaagaggggtggtcgtggaagacctgggacaatggaaagctggggttgctgctgggggcaggcagggccttgtggcccctagcagcactgactggctgtcatcatcacaaaggatccttacactgtctggctgagcagggcatggagccgcagctccggggacaccgcagggtatcacaaaggatggttcctgtctctcccgaaacacaggtgcacttggcgctccctgctggagggggcttcatggtggaatagacttggtgcccttagatcaccagctgccagaactggggaggacttcagtgatcatggagttcatcccgcggccaagttgtcaagtgaggaaacagaggcccagagaggggtagcaacttttccaaggccacactgcagctcaggttcagagcatggggaggaccctgccccggccctggacttaggggtcagatgcttttccaggaagcagggattgaggaagcactggcattgataggcaactcaagatttttcctttcttttcccctcatttcccctccatgaaaacctgagtcttcagcatttgatgggaccccaggagctggtggctcttctgcttccccacgctgctccttctcgcttgctcctctgtctggccaccctggtcctcacactaacccatattcaagccctcgcagccacacgcagtgatccttggggtgcccacactcaaccaggccatatacaaagtgcatctttgtgctatgcttgtgtgtccacagggccacacacaggacacaccccacacacaggcacctcaggcatagcgtgaacacgcacaaccccgcacacacacacacacacacacagcccccccccttcacccctcaccattcccaccccaggcagttccctgcctctcctcagcacagtgggaacaagggatgctgactctagatgagctctagggaaggggttccctaggaatagaccactgcagaccagcttctcaaaatcatgacatgagccagacccacaaacccacatttcaagcagagcctgaggactaaggcttggaggctgggaaaaccaagtgctgtggtctccttcctcctccagtctctcctggtcacgtggatgcctggcctgtggacacgccatccactcccatcctttcccatcccctgcatggctcatgatcaaggtgacggggggaagacagctgtccctctgcaacttctgcaaactgcaagccaggcctcctccactcctagcctctggcattcctggaaaactgggctctcagcaggaacttccaacaggttctaccccagagagctggccccgactccacctggatccaagcccaccggctggctaatgggctgggagcaggtcctgccctgccccgggaacggtcactgtggttccatctatcccagggcggtttcccccctggagcccttctccagcaggagagcactgaatggcgagccactggcccctcgcccgaccttcgtgagccaaggctgagtttattgtcagaaagatgactaagaaatccccgacacagtgtatcatcagcattatgattggagaaacaacacctacaaaatctatgattcattaagtgtaaccaatatataatttaaaacagtgggttttgtcaaataatgtgaggtcagcataattttctgcctattactaatatctataacatctttgccttagtcagctctatttaaatatgcaatcatttacagcttttgagaatatttctgtgtactcccaatttccaatattcaactacgacaaattttatgctgacatcaatagcaaactattaaagacagtatttcattattggtttttcatcccaaaagttatttacaattatatactaagcactaatattaaaggaaaccatttaaatgaggtgctatctactttaacaatatgtctgtcacagaatgagattgtgtttaaagattttatcaagaaatggttgtttgctgaggttatgttttgtccatgaaatatgcatttcatatctctttcatttcattaacataatttaatttgtgctttgcattttgtgcataatacatatttgatttacaaaacaaatatttccattagaaaatgaatttcatgcaggcaaaaaagcagaaccaaatgatgtattgaaggaaaataagaagaaatgaaatgcattttctcagtctattaaaaaatctatggcattgacagaaagtgcacttagtgttacgtttaaaaaatagcacatatgtcaatgtattaacaaatagaattggaaatacaaatatttccctatatcaagccaagaatctctttattttaattgagttgatttaaaagcccaactacaatttaatttttatttcatgatgtggtgctggggctggtgctgttggaactgcgtggggttggcggttgatggaagaagatagttgaccttaaaaatggcttttattgacaatggagagacatggttgaataggaaggaaacgggaagcggggcctttgtgatctggggggctgggagtggtgagcggggctggcgggctcctgagccgctcctggcttggctgttcctctgccaacccctccccagcccctctcatccccacctggggctgctgggctgtttggggacccaggaagtgaggaacgtgagtctcccttagcccacgcccgtgatgggggctctggagttagaggaatgtaggagctcagggctcaggatccactaggaccttgctccccctcccagcccacaggggagccccctccaggccaggagcgggctgtgtatgctgggggcaagtgcatctcaaccttatttaaaggggatgtgtggggctgacagtggttatgtcaacaatggaagaagtggctgagatgcccaggtcggtcactgacacagggcaccgggcaggacccccaacccactggcccaggcctgcctctcccacccctcactgtccccaccctaggcagtcccctgcctctcttcagcccagtgggaacaagggatgctgactctaggtgagctctagggaagggggccctaggaataaaccactgcagaccagcttctcaaaatcagatgaggaaactgagccccagggcatgatgttgcacagtgggtctgtggccaatccgtctacactggctaccgtgactctgctcctattccctaatctgaaagctctttcctgtaccccgctaatccacacccagcctaccctgggcccccacagaataaggaagtagcccttggcctgccagcccctgggacccacgaaaccgggtgggaggctctcacctgccggctcagcctgtcgggaagatcccagtggcctctttgttggggagggctcctcagggcgcctgagagcctctactttatgtatgcagagggcagtggtgagcatgcggatctcagtgtggctgaggtgtacagttgcacaggctgtgcactgaaccacagtaggagtgtctttcacatggatgaacacgagaagggctcccccaggaattgtgcagtgcagtagctctggctctgcaccagggctctcaaccagaaggtaacatcacaccatcctcagtcatgggacatcacaggcagggatggggctgctgccacactctcatacacatttacacatgctcagacacactctgacatactcacaactcacactctcacacatgcacactcctacccacccacatgcacacacactcatccatgctcaccaccctttcacaacctctggaggccctgagggccagcctgcccacctgtgcccaacctggcttgtgctctccccatcggaacggggctcccctgaggctgggccatccctccctgacagtctccctagaacctccaggccagaggagcctgggccaccgtgcatgtgggcgatgttcacaggccttttggccacaggtgccaggccaggggctgagggggacaaggagggcttcccccagtatctggatgggatctgtggactgggggtgtgtgctggccagccctgggatgccctggttcctgcttaaaaccttgccccacttctccagcctctgcccctcccatggcctctctgccacccagggccagaggagaacgtggtttgtaattagaaaaatctcttttctttcaatcccaaggactgcaaaaaatagagagggaggaaagcagcagagaaaccaagaagctgaatttccactcaggagaggcatgaaggggagtaaagagggttggggcaaggcctcccatctggggccgggatgcctggctctcctggtgcctgtcttgagacactgtgtgtcaggagctcctggacagcagcagatagctctctgattgcccaccatagtgggcacccagccccagcctgggctcctagctgcactgcctggggctgatggggaaccagagagccctctcggcctcgcacatctctgttacaccacggggctgctgaggccactgatcctggaggggcatcacagagggtgagccccgcccattcagatcctgtcccaatgcccacctgtggtaacaccttcctttctctcaacctggcctttctcacccacaaggtgggaatggtgatttccacctctcgggagaagagagaatgggtaagaactggctcactggggactggccatgggctgtgcgtgaagggagctgccgggacagagcgggaggtcctggctccccggagtacctggccagcattcccttggccaggaggaggctgggaatgtgctgatacaggaaagcagcctgctttctgcctggtatattggaaagaaatccatctctcggggaggacaacctcatcatattagaggtatagatttctggcttcagctgggacagaagtcctccttcccgagagggaagggcagtcttccctaccttttacagctccttcagagaccctggggctgcaggggccagcgtctctgggaagggctcaccaaggtaaggtggtcaggacccagtgagcctttcccagagagggttcaaaagaatgtctggggccaagttcaggtctggggccatgtccatccctgaggaatctgggagctgtctcctccccagccaggtgccatctcctatggccccgacccagccacacatgagacaaggcatcccatgctgatgtggacagttagtgtgtgtcacatgacaacacgtgtctgcctcacctgatgccaggcactgcagagactaaagcctgggaccccctccccaccaacagtgaagcacattccccaaagggaatttatcctggagctattttaacgacagttcgattgcaatactttcttttattatatatatttaatttgtatacaactaatataggtgcagaattttaaacagcatgtcacacatggagtgaaaaaaaaaagcagtctctgttttatcccttctcaccctgattctggctcccctgggggccactttccactctttgagctgttctaattgccctgggtttttttttgttattgtttttgctttttatttttgtaatgtaccattggtaatttatgccagatttctcaccagaacggtgaactcttatcatgattgttgacatattcggctgtgttctgtttctatttttttctcgaggatgtccttctgacagtgtttggatctgctaattgctcccaagaattggggttcagctgctctcccggtgtcttccttcagtctcagcctgcaaatcgcctttgccatctctgttccataagctacctcttgctctttcttggtttacacctttgttttggtggtgcacatcctccagtggctttggaaaaaaggagcttggaaaatggccttttaaagactttgcatatttgaaatgccatttgtccaccatccctcttgatcaacccattcaattggatctagaattctaggttgagattatattttgtcaatgttgaaggcattacttcatggctgtcttaattcctgggtagcttttgagaagcccaatgtcttctctcttttctagtcccagtcttttgactgtggcttgttttgtcctctgaagctttaagaccctttccttattcctgtcattctgaaatcctgcaaggatgggctctttctatctggagactcatgtcctgtaatcctccgatgcctccttgagtgatttccttcgaagtgctctacccagacttttctcagtcacatctttctgggactcttatgagtcctctatttgaacttctaactctgctatccactctctccttggatcttatctttcctctcctattttttatattttttctttctgttctactttgcaggggatttccttaagtttaatttccaaccactctattgatttatttttaaattctgtcctcctatttctactttttaaaacacttttttcattctttctttttctttttctttctttctttgtttttttttttttttttttttttgaaatggagtcttcttctgttgcccaggctggagtgcagtggcgccatctcggctcaccgcaatctccacctcccaggttcaagcgtttctcctgcctcagcctcctgagtagcggggactacaggtgtatgccgccataccaagctaatttttatatttttaatggagatggggttttaccatgttggccaggctggtcttgaactcttgacctcaggtcatctgcccaccttggcctcccaaagttctgggattataggcgtgagccactgtcacccagtctttttctttctttcttgtttattttagcaaatgttctttttgtcaatctcccattcctgtgtcatggaatcatgtcctttcttccctctctggggggttcatgatgactttgtgggtgtttcctcttgcccctgcattgcctgcaactctcacaagttgctcttttggcctctgcctcttgcattggaggctttcctcagacatagtggccgtcttggaatgaagggccagaggaattaaccagaaggtttgcagacagggctggctggctggggccttgtggtgggtgacggggaatgaatgcctccttccctgggaactgtcacatgtggcatccactagtctttcttttgggccagtcattttttgtcagtgagaagtccgctgatgtcctgtgggcacggaggtcagttctggggtcctgggggaagctggggctcaccattccctaagaagcatttctacatatcttgtttttgtcagggggtactgcctctgctcagcttcagagaaggaactccactttctgctaggctgatggccccctcttttggccacagagggctgggagattactggggtgactctggctctcagccagccctctggttttagctctgtctacaccccatgctcaaacgtacctgttgcctccagtccctgagtgtcccctgctgcagctgcatggctgctctcactcactcggttgctgctgctcatctgctttctatctgcctcagcctgttttttctgctttaacaaaatccccaagactgggtaatttataaacaacagagatctattttctcacagttctagaggctgggaagtccaacaccgaagcactggctgtggagggccaagtctctgcttccaggatggtgccttgttgctgcatccccctggagggaggaacgctctgtcctcacatggcagaggagcaaaacagcaaaaaggcctgagctagtgccctccagcccttctaaaaggcatggactcaccccaagggcagagccctaatgccctgatcacttcacaaaaggccccaccccccagcaccaccacaatgaaattaagcttcaacataggaattctggaggagacacattcaaaccattgcatcatctctccaactttttgtcaaaatccctttttgtgttgtctcccttcccattctctctgctttgtggacttgagccttttttattctcttactgtcagctgtgggatttgacatgaaaacagagaggtacttgcatggcgactcttccccttgtacccagaagaacacgactgctggatagctctgtgccagtcccttcctgtcctttggacccaggttgctcatgtgaggaagaggaaagtgttggggagatggcttctcaagtatggctggctctggtggtgtttctgggctcttctaaggtctccggaaaccttcatagactctgcagaatgaagcaccacagcttggtccagggcatctgcagattgagacggccctctcttcctcccagtcccagctgactccaccaggatccagcacccagcaatgaccacgcaaggagcccactggccccctccccagatgctggggcattccttctctcacactccggccaccagggtaggagtctcccagctaggaccctagactcctaaagcttcatgcccagcagagatgtgggtgtgacaaaacagggagtggtagagaccgtggctccaggcagctcatgttccctcaaaagacatgcatttcgaagctttcgtaacactaagctgtcttgtaattacctacgtaacactaagctgtcttgtaattacctacgtctgccagctgtatgctttgttttaaaatatagtatattagcaggaaatttaaggtgcaatacggccaatggatcaggagacaactgccccggacaaggtggttagttactcacagtccccaccaggagggggcatgccacacccccagggccacgtggggcagcaccaggatgggtcagaggcagaaggagagaggggaacgccaggccaggacctccattgtggtttccatgggcaggaatgggaaagggagggtaagcaagtctaggagggctagtctgtgtcatttcagcagctctggggcacagggactgtccctggttctctggtacttggccctggggtgatgagagcaggtggagagtggcctggaggacgagagccagcagaggaggtggtaggattgtgggctctggatcagttgggttgcatttgaaagtgccttgctggtggtgagctgtttaccttctctaagcactggctggctctggcaggggcagccccttctgggccagcaaggctccacatgtccaaacaacagaaatacagaaaataagagacgtaactcatgcgttcctccctcccggctgctggtgaggcaccgctgctgggcatcagggggctggagaaggtgcagacctggccatgccagaggccgtatgctgggggcttcctcttgggctgagggggttctgggctgtgtgggggaagagcaagttctgtttaggaaatcctaagtaaggactcaagagggaacaggctgcattgggtggtaaggggtttctgggtgagggctgtgagctggcttgcagaagaagcaggactttgagatgagtgtggctatatgaaggagacacccctaaagagaggggggatggtcaccaaaagctatgccataggacagccctggccactgaggggtggggcctgtggctgtgggaagttcttcctcttccacttctctgcccaccacccgtccctgccctctcctcctccttatctggggctgtcaacctgtggcccagttctgtgtgtcaattggcctctcggaagtacccagcagcccctgctcaaatcccctctccccttgtccggtgtgacctggcaggtgagtccctgccaaggccttagggtgatggggtactgtagaaagatgggtttgtgctcccctgttaatgctcctgctggctgggagaggctgggttaccaccccatggttcccagacgttggtgggtgagggagccggcgtggggcgttgcccaggggagggatctcctcaagtggttcctgatggcgggaaaataaaaatggtgatttagaggccgcccccactcgacgggctttcttagccgaagacgttcagctaatgaacctcaagcagattcatggccgggtgtgaagtcaacggagtcctcactccgtggagacgagcagcataaatctttgtttttaatgtctaatgatatgtaaaatatttaaatttgcaacgcagaattattaagctgccaaggttttttttgcctattaaagtgtattcttgcctgagaatttatggggcaccctgtggccgccgccagcccccgttaggggacaggaggtatagatttgtggtctcctactgtaaaaaacttcaggatcgcctgaccctgtaaactgaaaattcatgtctctcgcccggggacaaatgcattctttgtaaaggcggcccgtggccagccttgggctcatgttagtttattgtcactggttgataacgtttaatggaaaagatacaagagtgccaaagaattttaattatttttgtgataaagttatatgttcggccttgaaaaagtagagataatgcagggattcattattattcccagtgtgtttaaacagacaacgcagaatgcaaacaaaagcagatgaaatttgaaaagtattatcaatattgcagatagcagatgccctttcgaatcagaacaagcatatcttctatagcaactttatggttgagtagtttattcatttccattagaaggttgtacgtttctaaaatatgtagatggtatctagaaaaaccaaccaaccagacgggtcattctgcttgttttcctaaatttattatttcacttttgcaggcccggatctgaggggcattaacaggggagcagagtcttactgtgtcaaattctatcttgtccgtgacctttggcgggctatgtgctggcacggagaggaagttggagcgaggtgtctggaccatggcgaggtttgcgtttgccgttatctgggttgcattggcgaagctgccagtcagggtctgcctgcctgtcgttaaactttccacattccctgggctccctctggcacccgacggagggaaacagagtccaggagaaaactgcacacacccctcaccatccatttcttttccccgtgccctctgccctggattcagatgtgcagaggtgatttgggtcctgcctcaatgtgtagaaatggacctgacttcttcccagggctgtgggcttccttggcattgtgccaggggatagagttctggctttcttgagcagtcagggctttccaagttgtgccagtttttttttttcttttttttttttgagacggagtttcactcttgctgcccaggctggagtgcagtggcatgatctcagctcactgcaacctccgcctcctgggttcaagtgatcctcctacctcagcctcccgagtagctgggattacaggcatgcaccaccacgcccaggtaatttttgtatttttagtagagacggggtttcatcatgttgacaaggctggtcttgaactcctgacctcaggtgatccacctgcctcggcctcccaaagtgctgggattacaggcgtgagccaccatgcccagccgtgccagttgttttttgaggttaggagcagtccctagagaaccaactgatcccaaagccccaccaactcctcttggaacctgatcgccttcctatcttgatttttgtttctaggaaatggatcaattcttgccctcgtgttcactgaatgaagtaacttacagccccagctttgcagccagacagagccctgggcaagttaccctggcctcggagcccccacacctgacaccccacgtgttctcagctgtaacgtgggttgcagacacccgtgttgccaatgttattaccatgattgttgttttcttccactggcagatgcacaggaaatggctctctctgctgaactgagcacctctggggctccttcctggcctggggtttctttgagacaggcccaggagagtgacagccgggcctgagagggaaggacaggctgtgactcacaaaggtgcaggagtcctctccccgggttcaccgggagctgacgggctaggccgtgggaggccttgagaccaagctccgactttggagatgggccaggcttggctgggcgcctccagtggttttgaacagggggcgccatgagttaactggtgctttcagaaagctaaacctggcagcaagtggcttcttcagagaagggactcacccaacatcagaatgtttaccaaaatcaatcacgcggtgggccatagagaaagtctccttacactgcaaagaatctgtgtggttataccgtgtctgcgatcacagtgaaatacaactagatattaaaagcaaaagaatagctcagaaattctgtttggaagctaaatagcatgtttaaaatagaaacaataaaagaaatcagaaaaatcaaggatggcatgattttgaggatgctacatgcccaaatgtgtggcacacagagagagggaaatctatgcctttaaatctatttatcaggaaacaagaagggttgaaaacaaaccagctaggtgtttgctcctagaaactggaaaaagagctacagagcaaacctaaaggaacaagaaagatgacaggaataaggacaagggcaggcacaaataaatagagattagcaaaggtgcagacaggttttttggaaagattaacaacgacagagggagggccacgagatgatgctgtcaggagggcgtgcaggacacaggatgctttgggctgtaggtgtggggaaaaggcaaccaggtttttccatgcatctcacaggactggtttgcctgggacagccctggtttctgcctgttgtcctggctatcactcatggcatctcccatcccctcaaagggtcctgctttggaaggtaactgacaccagtgctgtccaataggaactgagacccttatgtaactactgagatgtgtggttggtgcaaattcacatcagattttgaagacttagtatgagaacaagaaagtaaaacatctcatacatacgtgtgtgtgtgtgtgtgtgcgtgtatgttttatttttatttttatttttttgagatggagtctcgctctgtcacgcaggctggagtgcaatggcacgatctcagctcactgcaacctcctactcccgggttcaaatgattctcctgcctcaccctcccgagtagctgggattacaggtgccaccaccacgcccagctaatttttgtatttttagtagagatggggttttgccatgttggccaggctggtctggaactcctgacctcaagtgatccaactgcctcggcctcccaaaatgctgggattacaggtgtgagccaccacacctggcctcattaatattttttatattgattacaagttcaataatattttagatctattgaattaagaattaatacatcactaaaattatttccacctggttctttgatgtgattactagaaaataaaacattacttctgtggcttgcattctacttttgtgttcagtgctgattgacacggtcaccccagccatgggcgggacgctgggatgggcctggttaaaggcaaaggcttcggttcagatgcagaccccagcactaacttgtcttagtcaaataataccaactccttacgtttcaattcccccttctctaaagtggcagtaggatgggtctcggtctcctaagatttggggaagttccacttaggtaactcgcgtaaagcactcagcgctgtgcggttggcattcattaagtattagttgccagtcataaaacagcataacgatgagatgcttttccccccacagccctgtgatgccactttattgcttaggaagtgatggtacatgaaatgttcagtggcttgcccatggcctcaagagagcaaagctggccttcccacctcaccacatgacactggggtaagatggacagcgggatctgttgcctgtgctcctgtgagccggctggcctggcagagggggcctctttgcttctaaccacccttccttccgccagctcatcctactcttccctagaagccatctctgcccaccagcccccactaatctcagcccatcctggcctcgagtgaggagaggatgttctcttggccttctctgcacactccgggttccccaagtttggaccttcgactttccccctctttctccccacttggtgcccccagcacgtagcatgaagtttggtcctccacaaagcttggctgggagcttgacaaatgttccttggtttgtcaaacaaactctccggcttgaactaagtgcctttctttcagatttcagaatggatgggcctcagccatggcaaatctgagagtctttgtgtgcagaaatgcccttggatgcccttgtctgtgcatggttgccagagctggtcaccccagccagacatgctggtctgggcacctcccgggaggagccccgggtgatggcacctgttttcatgaatgacacagcaatctccacttcagtaagggccgaccatactgttgattcctgccctgagacccttctcccctgccctggttctaagtgtagatccctggagatctgggactgaccagatgagactaagagggagcgtagacaaggagccacaggaggcgacactcccggtggtggattcctgcctaagttccagggaactcagaatctgggggccacgctggcaacatctgtctcttggcttcccaaagaaagactaacatgccagcaaagccaggaaatgtcaagaccgagagctcatgtggatgtagaacttcacagttgacaaaatactttatgctcttttatttaattttcacaaaatctctgctaaagagtggtgttattcccattgtatagcagaggaagcccagacaagcgaacttggccaagaactcacagggcttgaaagggacccgcctggtcccagggatggggtgtcaccagctcgggctgggcagcctgctgcctcgaagtctaccctgtgtaccctgttgggtgaagagcatcagggatgagaggagattcttgggaggcagtagaaagggtggcaagagcttgtgctcaggagttggataggagtttaaaccctggtgctccccgttgcgtggaaactaatgaggctgtggacaatctcttcgtctttgggggtttccattttctccttgggggtgttgctaacacacctcacctggctggtgtgagggtttggatgacgtaatgcataccagtgcccaggacagaggaagcaccctgtgaatggtggccactgttgttaccattgggccagagatgttggagaagtccctgagtccaatcaattacctgggaggttgaagccacatgccctgggagagggcaggtgaagtgctgttgacggaggcccggttccctcgaggctggggggcacctccagcttccgactcctcctgttctccaggttcctccaggaccagaccctgcagcccagtctgtcccactcttgcagggtctctgaacctgaaagcagcttgggaggggcgttctgttgcgaggcgtagagtgtttataagaggagcctggagaactggaggagtccgaggttggaagtgccaaccagcccccagggaaccgtactgccttggcagcatgtcactcactctctcccagggctgcatcgcttcacacttccagtcctctgtatgtcttctgtctcctgtctgtctgcaccaatacggtggctcgcccaagccccatgaccgtgcagggccggatcccaccactgttgcactgcttggccagctcagttccaacaggctgtcgtctggcttcctgggccctgcatccagccctgaattagccacgtgtcatgctacactcaggcctagccataatttggaaggggacaatggctagcttgacggggcggacacactgaactgggtcctaggatcagcttgcgcaccccgtggcgtgatcagaggagacttacgcctacacattttagggaccaagaagggaggtggccactttcatcatgcagctgtctccacagcctgcatcctcggaaaggagccacgatttccctgcctggctgctcccagccaccgtgggtgaagaccccagcggctttccgtggggaccagctgaagggactttctctgagtgccagcagagggaggtgcctctgttttctaagctctgcccttctttgaaaattgagctgcttaaaatcaacccatttgggacaagcggccttgactcttctcccatgatgtgcagggctaatgttaaaaggtaaaattgtgtgcgggttcccaggcaatcataattagagtaattgtcctgtgttgcaggcacccctctttcttggaagcttaaagcactctgtgagcattatccaattaaatctggaaatagccgggtgagagaggtggggacagaccatgcactgtttctggccagaaaacagcagccgtgagaggttaagtgacttgcccaaggtcccagagtcagaaactgagacctgttcagcgctcagtggattagcatccaaaaagcatttactccacagctgcagctcacacggcaggtaggaagacccagtttcatatgagcggcagaaattccccatccagctcccaggttgcagtttgctctgaaacccagcggtgtagcccccaccctgcccaccttagctgactactgggcctcctgccctcctcccagctcctgcagacctttgaaggtactgacgagcctaaataaaccttcctgtagataacaggtggtggtggccaagagaactaaccaaaccagatacattttatgggttgcagaacaaattaactatgaggaataactgtttttgagaaataacagagttataattgtttaagtagctctcttgctggtgtggttttatggctagcctctgctgaactatagacaccccaacccacggggcagatgggcagtgggacccccacaagtggctttgaccccaagttccatgacagaaatggactgtggacaccccaggtcatgctggggaaaccggtgggagagggtgaggccctgctggcgacccgtgagagccccagggtgtgctgggacacgggtgggagagggtgaggccctgctggtgtcctgtgagagccccagggggtgctgccatggacagcagctttgctggaaagtcttctccatgtctgggatgatgactggaaagacggagatgtgggaatctgtgaatgcttctggggatggcctccatgccagagtcccagagcaggagtgtccttagcaaatgttgtacccaaccaggagaagggacgggccaagccctgtaaggtgcatcaacatttacacactcatcacaacacaggagtgccaggctctggagaggttccagggagccaaaatgaaataacaaaaaccaaacaaagccccaggtccttgccctcctggggcttgttgtctcacgggggaagcagacatctatttttaagagccacacggatacatgtattatttatgtggtgaattccaggaggagtggggcccgggagatgtgtggataatggagctgggggcggggaccggcaggagctggggatgcaggagactccctaggaaagggcggttgaggaggacctggtgggtgtcaccaggtgacacctgtgaagtggcatatgtgtgtgtgcatgggtgtgcatgtgtgtgcatagaaaggaccggaaggaagctgtcccagatacagggaatagtaagtaatagtaaggctccccagtgggaaggaaccagagaatgcataaagggtaaggggtcttggtgctgcatgaaaaggaaccctatgttcaatataccttttttggggtgatgtaaatcatggaaattcaagtccatctaaactttccttatgggactgtacaagggagagcatggagaggcttaatgggggcaagtgtaggagagggttaaacccaaatggcacggcccttccggctggtccctggttactaagctgtgcctggattacagcacctggggccatggggcccccacccggagggctgcagagtgagggtccctggagcctgagtcctggctggaggcccagaggccaagggattacatgatgacataggggattggcacagaagaggtgcggccagcatgattacatcgtccgtccctcgcagcctcccaaagaccacggtccaccttgactgcgtctgctgccaaggatgaggccttttgagcatctgccccaggcctgtcccagacacagcgagtgagagggaaatcttcagagggctgtcagggccttgctgctggagtgtggccccaggaagtcattgggtgggctgtgggggccccaagtgtcctgtgacaatgtcgtctagggcctctgcaggtccttccaacagtgggtctgcactgccaagctcactcatttcggctccccccactggcccccggtgacacagggagatgggcaggtttgcctttcacagggttcattactttgttatcaatgcctcctgcccctgccccccacttcctgcttgctgcaaggtcccccatcttcaacagtgggtagtgggcctgctggcctctgaggctcagccccagctctgattgggaccagggctcagtgggctccttcctcagggggaggtctcaggctcctggtgaagccccctgagcttcaggaaggtaagtgcagccatttgaacagccctcattggccgccttcccattgtggagaattaggtggccgggctcctccctcccaccctacgattatacaatagatttaaagtctctgatatccacaaatctacatcaaaatatattctctagctgtagggaacgtctcagaattgttaaccttctccccaggtattagaggtaacacactgtgagattagatgtatattttcttcaagatacaccacccattgaggggttcatatttacatcttttgttgatattttttatagattaaaagcgcctctttgctaggtgataattctgctaagtactgtaatttgctgccattaatatttgtctgagtcctagtttgcaaaatatatttgaaaccacgttagaaagtcgcataattgcttctttaagctggggaaataagcagtttctttacccagcctttatcctgttaacctcagaggggaggggtgttcatggagtcctggaatcggctgagcacatcggccattgaattccagtgcctactgggggagacggtgcggcccggctgggcccagctgcgcccagctgctggtggcttctgggctgctcctccctgggccaccgagggacaggagacccatggagaatgcaccacccctgcctgggtcttaggccctggggtgtagggagagctgcctaacccctgggagccaagacaccgctcttcctgggcctctcttgggtcctcatctggaaaatggaggcactggcctcccagcctgactctcccaagggagggtgtggaaagccccgcccagcaatcagatggctctgtgcctgtcccattgtgggcgttccacaaatgttcagggcatgtgtaaatgacacagctggtggcctggccaagcctgatccctgggagagtggggcttacaggggctgagcatgccaggactcacagggctgggtggtggggcagggggctctctgtgatcaagactaggggcaggaggcccagggtgaccagcacctgagcctctggtttccaaggcagctggagaccccggctgtctcctgtgctccccacaccacacacacccaccctccaggcctcccaccatgggaacaggcagctccaggcccttgcgagcaggtggattctatagtcatgggactgcttacaagaggctgcaccacacagatagaacatccatctgtttccagtttctgtgcgcattcttcggggtcttctcttgcaccccaaggtggcaatcaactgggatatctctaatcagaagagcattttgccttctattgatctgaaatctttcctctccaactacccagcagctgttcccaggtgtgagctagggcaccatggagcaggactgagctctcacctccaactccacctcagccatcaggagcctcctagccagcctcagtttatccagtagtgagatgggggtaatgatagccctgacctaacagtggtgtttgttgtgaggattaaaagagtgaaggtgtggcgagcatttggaatagcacctagtgatagtataatagcatttggtaaatgttattggatattattatatggtacatccatcagcgtgtagagcgtgtatctttgtgtgcagagcctgtgtgagtgcgtgtgtgttctcactatgtgcacccctgtggatgtgtgtgacacacagtgcacatatctgtgtctagaggggttgcccatgtctctatgtgtgatcaacccaggcccacacgcttcctggggtgcccacaagcatggtttcctaatggcttcatctcctgcccctcaagttctgttctttccatctccccatgtcaccctcctgccttggctcccagcccagcctgcacatggcctgtccctcccaacccctccagcctgcccccacctcctgccattgctcgaaataccttcagggatgttcaggcttttgccctgccattctcccggtctggagcatcctcacttcctcttatctgggccaacttccactcctgcatggattctgactgaaatgttgcctcctctggaccgtcctcaatctctcaggtcccctgcattgccctcatcctgcagccctcttccgcatggtgccagcagctacctgctcccctgcgtaggtgcagatgcacctaagttgggagccctgtggctggggctcactcccatggcctccctaactcccgtcctggctgagcccattgtggtccacacaatcctgtcctctgtggctcctgagagtcttggaccctcaattcccttgctgaaggtggaaaggctgtctcaggggtggggccagccctcagacacctggtcatcacacacctggttatcaggcacccgtccatgccccagcatgatgtagtggagggtggggtagtaaagggatagtttgggtgaagtcagtgagtcagctggctctgctgggctgctgggctcaagacagtcgggagcaggtgcccagctcgagagaggcccctctagcctaggctggtgcctgggcacagcatagcaaggcagattgttgtagggtccagcccctctgagctgggagtacagagactgccctcagcttgcctgggcctctctgcctgctaagaagcttccaccagtggccagtgcccctctcccaccctgcagtttctggtatttggagggcaagtgcttgtgtcttcaggcgtgacccccatctcctcctcagattcctacaagatagggagggtacctggtggatccctacttggctgaacaagaatttaaggctcagagagaagtgagtgaccccaagtcacaaggctcactgggccttgggcttctgatgccaaatcgggttgttcctgagacccacaaaaggtggtacagccacccaggtccaaagaaaaaagctcaaggcaggaaaaattggggtgattgagctgggtgggggaggggctttgctcagcagatcctgatgcaggcccagccccagcgaggcccttctctgtgcatacccactggccttgccctggccacacaggccacagaatgggctctgcacactgggctgagggagggctggccctggccctggaggtgcagtgccgatgaccctacagaagcctgtcctgaatcttgaggggttgggagactgggtcatccactctgatggggtgaggccttggggcaaatcccccagcatcagtgaagtgagctggagcctgcagtggggctccggccaccagctacatgcactgcaccttccctcacttgccagccctggggtgaaggggacttacttctctgagcctgattcctgtctgcagagtggtgaccgtcctggcacctgcttcccaggagcgtggcgcgcattagaggagatgtgttcattcgggtttccacagaagtaaactctgagaggaatctgaatgtatttgggaggaagtgcagggagggagtaggagaagagaagacggccaggcgctgtgctcagaagcagcttagggccactggtaacgggggcttgggtctgctggggacctccagggaacagcagagcacaagagccctgggagttatcttcccagagggcaaggactccaggtgattatccagcagtttccctcactggcaagggctgcttccacggtgtgaaaccccaggatgcgtggccagtcccatgcgcctgctgagcacagtccagggccagtgactgtcctcagcacagtggcagatgctagtggtaggaggccgggggcactgggaatatggagggaaggggtgggggtggtgcatcgacattctagaaatataggccgggtgcggtggctcacgcctgtaatcccagcactttgggaaaccgaggcaggaggatcacatgaggtcagaaattcaagaccagtctggccaacatggtgatatcccatctctactaacaatacaaaaattagctgagtggcgcgcacctgtaattcaggcgacttgagagcctgaggcaggagaatcgcttcaatctgggaggcagaggttgtagcgagccgaggtggcgccactgcactccagcctgggtgacagcgtgagactccatctccaaaacaaaaacaaaaacaaaagaaaaaagaaaaaaaatacgcctggcggaagttagtgcttcataaaggctggcttctgctattattatttcacattggaagggcctccagaaatggtcacacctgatttgtgtattttcatcaacagagggaaactgaggtccagggaggaggtcttacccaaggccacgtgacatgcattggtggcagcgctggtcctgcactctgggagattcctccggggcatccttgggtgtttgcctgtttagcatgagtttatgggacagtccctctgtcctaggcaccccacgcactgtgtctcatcaaatcctcaccaggcggtgtgcaatagaaatcacaatccccatttcacagatgagaaaaccgaggcccaggaagggcagaagaatggccacggccacacatgttagggagtggcaaagctgcagtttgagccctccacacaggtgtttaactctagcacacatggcctttcacgagcattgaaactgataaaggggagttgcgggaagctcggtagtttcagagacaaatacattttgttgagtggaacaaatgttctggctataaccaagctgcaaagctgttggaaaagcacaggtcaggaatggacacggcttccagggaagccagggctcagagcaggttcaacagatggaggggtcgcggcccccagagctggggagcccacttgagaaagggttgagggagcagtggggactgcagagagaggctcctggattgagggtgagatgaccagggagctgggcacacccgccaccagtccgcccgctgcccatctgcctgctgactgccatctgcccactggcctgctgggtgacagaggtcaggagttcgagaccagcttggagctgaaccctggaagacacgccacccccgtgcagtgggacaaagatttgggcatggattcgctcagtgacttctggagggaagaggcagtcgccttcctttacttcctccagatcagtcttcgagctccggcacatggggagatcacgttggctgttaatggggtgtctcttttgtgttttcacagctgcagacactgggaaaccagggcgaggcttgcatccactgcactaatgttgcttttgtggtcacttggcttgatagtgtttctcaggctctgtctcctgggtcaggctgggtccttggcaatctctgcctgtccccttcagtaggtttgaaaaaccaagcctggagggatgcggtggtgatagactcacctttttggtctgggaacaggaacgagagatgctttcgtctgttttgagcagacccaacacaactccccatttccccaaaaccgacacaacaatgcagcataccaacactgtttttgttcttttcaacacctcattttgacgcaagagcttctcacacaccttggaaggggcttcagcccagatgaggggttttcattagcgttggagaggttgggggcctcagacaaatccatcctccaaggcagtgtattctgacgccgcagctgggctctgaaatggcttagaattttaggttttcagctaaatggtgaccagggcggtcagtgtgtggccaaactcattggaggagaagcggtcagttctgccctcttggggcctgtggctaggtgggaggtgagatggtctcagggaaaggcatgagagacctgcagtagcaaaacctccccccacaaggggcagcctgccctctgcagctgggtgtgccagaggaggggccagcaccctcagggagggcgggactgaacaagggacctccttgggctgcccagatgttactctccagggcctcaacctagtgtcaggcctgcagcgtggccttgcgtccttgatccttcagattacccatctgtagcaaggagatgatcatgtctcccctgtccactgactgatggaccacctgatatgggcgtctttgtgtttccaatttcttgtccatcctctgctcttgggtgtctaaggtcctgggatctattgtcttgtcaccagtggctcattgactcctgtagcccaggattccacttttgtccctgtatttcaccccccctcatgctctggtcactggtgaccttcacgtccatggacctaataggcttttctgccttcatcttagttgacctcttagccacatgcagcatgaatgtttcctatttgaaatacatgactttcttggcctccacactccacgtcctttcttctgtctttctgcgaagtcattcttgggtagctcttcctccttattctaaatgctagagtttatcatgtttattccttgggcttctttcctgcccctccttctccctgcatgatgctacctaatcctacagctttaaaactcaccttatcagttagcaattgctgcaatattactgtgagataaacttccctgcctctcattgtcagacagcagtgagcatgcatctctggtctgtgcctctgtgggttggctgcagtagctctgctccatgcacctccttctggggccagttacatgggcttgatcttctcatagcatgtattagtcagggttctccagggaaacagaagcaatagtacatacacagtcatgtgccacataatgacatttcggttaatgatgctctgcttatacgatagtgattccataagattataatggagctggagaattccaattgcctagtgttgtaggcattgtaacattatggagcaacgcgtcactccactgttacagtgatgctggtataaacaagcccgtcatattgtacaaaagtctagcacatacaattacatacagtacatagtacttgatactgataataaatgactatgttactggtttacgtgttaacgtacttctaattgttattttagagcctcatctccagagttgagtctgacctcctacctcacaactatcacagagtaaacttgggactcaactctagaggtggggctacttatataaaaaaagtaagtgtcctatacaggtataccattatttacacctgagctgtaaaacagcctcagacaggttctttaggagggattccagaagacagcattgctatcaagggaggcaacagctccatgcgtattactgcccctgaagatcttccagtgggatgagatgtggaggtggaggacattgatgatcctgcccctgtgcaggcctagcctcatgtatgtgtttgtgtctccatttttaaaaaaaagtttaaaaagttaaaagaaaaaagcttataaaaaagatataaaggaaatatttttgtgcagctctataagtgtttgcgttttaagcagtgttattacaaaagagtcaaaaagttaaaaaaataaaaaagttcataaagtaaaaaagttccagcatgctaaggttaatttattactgaagaaagaaaaatattttaaagtaatttagtgaagccaaaatgtgcagtgtttataaagtctacagtcatgccctaggccttcacattcactcaccactcactcactgactcacttagagcagcttccagtcctgcaagctccattcatgatgcgtgccattttttatcctgtgtaccatatttttactgtatcatgtgtatgcttagatacggttttgatatacaagtacttccctttgtgttacaattgcctacagtattcagtacagtaacatgttgtgcaggtttgtagccttggagtaatagtctacaccatacagcctaggtgtgtagtaggctgtaccatctaggtttgtgtaagttcactctgacagttgtgagatagtaggtgggactcaactctggaggtggggcttagacattggacctaattgagaactagttaaaacagggacggagtggaagcacctttccataagacatgcccattcgtgtgccatattggtttaccattgccatggcaacacctggaagttaccaccccttttctagggatttctgcatacgctgtctctaaatttgcacgtgattgaaagtggatataaatctgactgcagacctgccctggatctgactgcag[450 bp omitted]gcacaggaaaatatggtgtcccagctcaaagagagggagagcaaatttgcatcagatgaggaccatccacattggagatggtggtcatcttcactcggtctgctgattcaaacgctcaactctccaagaagcatccacagacacacccagaaagaaggttccaccagctacgtggacatcccttagctcaggcaaggtgacacataaaattaaccatcacaaagaaaatgctggagctcaagagaacaagatgatccaagcttctgcttctgctgtgtctgctactgcctcactggtctgctttgggttgaccccagagtcaggggagaggaagtttgcttggcccactgagagctgggacaaggatgtggatggatggttccattacaggagagtgaggggctgagataaataatttggtctccccagcacatctgtgccagcaactcccaaatatgtttctaggccaggctgtgaccttcagactcactccacacctcccttgacttctacacttgactctcctgaaggctacaggggatgattactcagtgcatctggtcttcccttgaagactcagtttccctgtttgtcatgtgagcaggttgattagatgagctactagttctgagagcaagtgtgggacttagggtcctgcatcgcctgcgtcactctagactttcttttggctttatgcccccttgggatttacctgatggttgagaacatgaacatttagccaatgacccatatggggagatggaagaagcttctgttgacccctcccaggtctgtgagcctggctctccacaagttctctggttccttgtgcagaaggttagctgggccatgctgagtgagtggatgaggttggtgtcctagttcacttgtgttgctataaaggaatacctgagactgggtaatttataaagaaaagaggttgatttggctcatggttctgcaggccatacaagcatggtgccagcatctgcttggcttctggtgagacctcagggagcttttactcatagcagaaggcaaagggggagctggcatgtcacatgacgagagatggagcaagagagagaaggcggagaggggccatactcttttaaacaatcagattgcggatgaacacagagtgagaactcactcattaccccagggtggacagcaccaagctattcatgaaggatctccccgcatgacccaaaagcctcccaccaggccccacctccaacattgggatcaaatttcaacatgagatttggaggggacaaacacccaaacagtatcagatgactttgccattcaggctgttcatggaatgagggaccctcacgatggccacgaatctgtctcctagctcaggctctgagttcagagagacaggactgaacttggaggctctaagctcagaaagtaggatctgtggggccacactttgggcaatgtctggccctgcagttccaccgctaccaaggtgatcaattcttctgcagtcattcttgtagaggcaggtgtggcctggggacatcgcgtcccaggcaggccgccctctgtcctgaaacaggcttcccggagccctgcgcaccccaaacaaaagctgcctctgactcctcagcctttgtgcacatctgcattattagcaatgctaataccattctgcaatgataaataattaaacaattatggtcatgaatcaataagtttagcacattttttcatcagcaaattgcactgtataaacaagaaatataaattaccaagtctaatttccccctaaaattataagcattttatatctaataattaaaaaagtgttagaattcaattttggatagttagaactttaaagaattttcagtttccaccaaacaccattaaattgtcatgttttatgtctctgaatctgattaacattttgagatctggcctcagaaatctttctttgttagctcccagagacgctccacccaggctccagcttctcaccatcctcacagacggcgaatccactgggctccggcttccaagggtctggatctgcgggttccactggagagcgaggatttataggaatttttgattgaaagcacaggtgacaaacccaaggcttgtgggctctgcacaccctccacagtcttttgtgtggcctgttggcagtttgatttttacgtttttgggggatgttgtttgctttgtctttaagtttagatgtccgggttttgttgaggaaaaagaaacccacaccagatttacagtcccctagatcccccatctcattctgtgcagcagctgccccgtctcaatggagcatgtatggtccaggtggctgcagtctccaccactccccacagtgtcttgctgtggctgaggccaccaacaattgtctcagaaggccacatgctctttttctgaccttggccccggtctcttttgcaatccccgatttagtggttagaatttgatgaccccccgaccccccactcagtggctcacacctgtaatcccggcactttgggaagccaaggctggtggatcacctgaggtcaggagtttgagaccagccaggccaacatggtgaaacctcgtctctactaaaaatacaaaaattagccgggcgtggtggcacacgtctgtaattctagctactcaggagtctgaggtgggagaatcacttaaacccaggaggcagaggttgcagtgagcccagattgcaccactgcagtccagcctgggagaaagagcaagacttcgtctcaaaaaaagaaaaaaaaaaaaaaagaaattgatgctctaagcatgtaagataaagttcacaaaggcccagaatcccagcatgttttacaggggggaacactgagtataagatgggtagtggttagagagtcaaggtcacccccaggccagctcccttccaaatgctgccaactgcttgttgctgccgtcccacccacctccagcccgagtagcctctcaccttccctggtgttcctgctgcctctggagaaccagacctctccgctccagcccctctccttccctcccttctcccaggctcccagagcagtgtcccagcctccaaaatgctctctttcttggcttgacctgtccgctaccaaaagatgaaactcaaccaagagaacatcaaggaacgccagcttcctacctccactcttcatggctagctgcatcggtcccaatcacgtggtgggggcaagtaataggatattccatccattagtggctcatccacggctcctgcaatgccttccaccctcgtgaagggcgccaccaggtacccagggggccagccgggtgctaggggtcattctggcagttccctccctttccctcacctgacaaccccccactcacctggcccccctgcctccccttcctcagtcctgtagattccagctctctcccaccctgtatcccctccacacaccctctccacagccccagctgcactgctttttccagcctcttaacttctttgaaaaaacattttcagcacagctgaagaagggaggttctaaattgagaatctgatgaggtacccctggccccagtttaaaatagtcaatgatcccgcttcctcaggaccaagtccattctccttactgctttacagtgtaggtgtgctggaggcagtgctgagaagtccacacaaggtagttcatgaatagggagaatgagcctcaggataaggcatccgtgtgtcggaagtgaaggctggaggccatgcagggtggtggcctttttgctgggctctctcggcctttgttctggtgaatccctctcaccttctgtttctcccaggtccacctcatccttcctgaccaagttcttcacctctcctgaggagccttccctccctaccccagggcctgtaagtgattccctccatcccctctgtgtccatgcagctctgtgtggtggggatggaccctggtgacatcctggtccccacagagctctgtgtggtggggacatatcctggtgacaccaggacccgtccccacagagctctacatggtggggacgggtcctcatgacacccctgtgtccatggagctctgtgtggtggggatgggccctggtgacatcgtggtccccacagaagctctgtgtggtggggatgggccctgcggacacccctgtatccatggagctctgtgtggtggggacgggtcctggtgacactcctgtgtccatggagctctgtgtggtggggacgggtcctggtgacactcctgtgtccatggagctctgtgtgttggggacgggacctagtgacactcctgtgtccatggaactctgtgtggtggggacaggtcctggtgacaccgctgtgttcattgagctctgtatggtggggacgggtcctggtgacacccctgtgttcatggagctctgtatggtggggatgggtcctcgtgacactcctgcgtccatggagctctgtgttgtggccatggccatgggttctggtcactctgtggtactgggagactcagcagccactgtgccttttggactctggatctccagtcctgtgggacagcaagcccaatgcccaggtgaacagaccccaggccccggaagcagtacactcacccacggaagcatgtggagtgcagacgggggcagaactctcactcccaccatgcccggtggactgggatgcacagacatggtccctggtaggccccagccctccctcccctcagggctgacctgtccgccatgtgcctggccacacctttcttgaacctggggatattttcagctctgccactgccctgggtgatgcacagttcctcgtttttccaggtcctcctcgaaactctgactctggagtaaggtttggtggacagagctctgttgcctcctcaggcccattgtgagttaggatctgttttcttgcctgccatcttccagagttgggctgggcacacaatgcgggctcagaagggatcctgtgcttgaaacatgaagggcatcacgcaggatgactgagactgaaactaacgaggtgactgacaagtacacagatgtgttaatatttcaccatggccagagtccagccagagggccggtgctgagatgcactgttcctggggcccttccagggccggtctgggtctctgtggaatgtgcgggctcaggaatcattgttcctggggctgttgtcacagtgtgtcaatgatattcattgaagaacatctctttgaatgagctaagaatgcttaaagagaacagtagccggccgggcgtggtggctcacgtctgtaatcccaacactttgggaggctgaggtgggcagatcacatgaggttgagagtttgagaccagcctgaccaacgtgaagaaaccccgcctctactaaaaatacaacattagctgggtgtggtgtggtgcttgcctgtaatcccagctactcgggaggctgaggcaggagaatcacttgaacccaggacacggaggttgtagtgagccaaggttgcgccactacactccagtctgggcaacaagagcgaaactctgtctcaaaaaaaaaaaaaaaaaaaaaaaagaggacagtagccatcggttaaagacatgcacctcttggttgaaacagactgatcagtcccagaaaatccctgctaagcagtcagctgccgaaagcacctgcctggggcctggaccctcgccaaatgtcaacatgatgttggggaccaacaggaacactggaagcacagtgttgaggagactggacatggagattgcctcaagctgggtttctcttggaatgcagagcctgaggtcaggcctgagggcgtatagcttactggggacatcatcccagttgatgggggccgagggaggtgggcagaattgtctaaggagtcatataaaatgcagctctcaagtgtccatctggagaaacaaagtggggactcatttacccattggtgccgtccccctaggtcgaggtgacccccgagggcatggattcctctccatactcaggttgcccacatgtgctctgcaagagatctgggcatgggctgggtgagtgggtgagagggtctctcactgcccctggcccacgaggggtatccactgcagggggatgcggggtgatagtccatggagggtgagaagcagtgctgcttctgcctgctcaggggctcaggtgattttggaggagacgagacattccaggcagagaggtcatgcccacacgtcgtggctgtgtcagcgtctctgagatcagccccattccaaggtcccaggtggacgcggacacctgggagctggggcagcctttgaagatgtgcagcgtggagggcgcagccaggggctgagtggcctccgctcagtgtcgcccctgcagcagggctggccttttcaccttgctgccgtccctgcctccatttgcctccattcgtgggtggaagttatcagggccatgggtgccaacgccaggatgctggggcttccagattttgtttcactcggtggctcttagcaacatgtttcttgcattctgctcattctgtttcacatttcacacttccccaggctgagcgagccatccatctagtgcaaacgcttctgacagggctggggtggaggacgccctgctggccccagcaaggggaaggaagggggcttgctgggtgggtgtgggtggcgcatgctggtcaggacagcctggggtcgatgtccctgcacccccgccccccgcctccttccctgtcttgcagagccctcttggagctggcgattgctctgaacagaccttcctcctcttttcattccagtctctctgatcacctggggagatacagaccttgcaccttctccctcacagcccagacaccaccggaatcacctcacacaccacctgaatcaccaaacatctccaaacagccctcagacttttactctgcaggggcaatttttttaaaaaaaatttctcttcaaccttctcaaagcctctagtcagccacttagagaagaactctccaaatttcctatctctccctctatatttatattgatttacatttaaaattatttttgcacagggttttccttgattttctttctttggcaattacagattaatctgaacccctagatttttgagtatgtatctatgtctctatttatctatctatattttattttaaatctgtaataatattcagaattagctcacaaaactggattacacaaagccagcaggtttaaaaatatttcaaagatgttgcttttatgcttcaaatccttgaaaagccaaatacattcacttctgaaactaagtcttgggttttgctgaaaaaaaaaataagaaaagtgtttaatagcacatatggcataattttatttgacatctgttttgtaacaaacaatatttagctcacttatttgctgaatgatacagtacacagtgcaaacaaaaagtccaatgaacagtttttccagagtttgtaatatatcaatatttattgcaaaagaatgcaaaacttaaacatttaagtgtgttattgattgtaatatgcaaaacattgattactgtatgttgccactgcaaaaaaaaaagtgtactaaatgccttctggggtatgaaaatgaggtgcatttcagcaagaggagctcacttgctccctttggtgacatttagtcttaggcctgccccccttcccccgtttgtgtcatcctattgaagacagctgtcaatatatttaggatgctttagctcatagcagcaaaaatggtgagactattggcttaattgtgaggagtgattgattttaatggaaacaacatttaaaaactcagaatgcactttctgttggcagtgctaatagaatcctctaatgaattgaagcttcacacataaatgcatggtacttactgcaacaattagcaaaggacaacaatggttgatgcattaaatttttttaactcaaaagttgaaataaattatttgtttacataatgggaccacgggaaccaaggcagaagcagaactggctatcacctgatacacaaagcacacaccaacaaaactgtggtcaagtgaagccacgagcaggaccctggtgttgttttctgtccttgccattattatcggaaaaataatatcagaaacaatatttaaacagatcctccttcaggttgttgggcagagggaaatggcgaggactccctgtcctgttgaggttctgtgtggtgggcgcatttttccttgggttgacatcagtacaatgacaaatgcagccaggaggggtgagctcaactggagggtcctgagggattgcctggagcacactcagaagcccccaaaacaaggcttggaaactgccccccaaccccagaacaggaaagttacagatttaattagatttttcaaaagaatcataatcatgaaagtaaaataaacagcagacatttactaagcatctcatgttccaaaccccacgtaagagatttcatgcctctcctcaggcatccctgaccttgacccctgaaaagcaacctgcaggttcagagggcacttatttggacctgcactggggctctaagcgcttggaggaagccatgacttgtgtcttccattttgcaatagttctcattagcgcttggtgcccactgtgtgcctggatccccaccgggtcgggggtggagtgagggcagagatggagagaccaagctcctgccctctagtgtgctgaagacgagggcttccaggaacccaaatttgtgtatggggcagtataggctcagaaaacagctttgagaggttcagaagggaagaggaggatgaccttgagcgtgtgatggttctcagggcccaacaacttcccctttataggggcatcctctcagagctgagagaccagaactgcagacagcctgggcatcccctggttcttaagctccccctataatttccccaccagtcccctcggcctctggctgaactgatggattctcagtctaactggctgcctctacccggggtggccttcatcacccttactcttaacttctccaaacctcagtcctcacgtttttcaaaggaaggttaaaggagggcccggtgtggaggttcacgcctgtaatcccagagctttgggaggtcaaggtgggagggtcatttgagcccagaagttcaagaccagcctgagtaacataactagaccccatctctacagaacataaaacaattagccgggcctgatggtgcatgcctgtagtctcagctacttgggaggttgaggtcgaagcatcacttgagcccaggagtttgaggctgcagtgagctgtgattgtgccactacactccagcttgggggacagagccagatcccgtctttaaaaattaaaaaaggaaggttagaggataaaggagataatatgtggaaaggactagacagtacctagcacagagtaagcgctcagaaaataccagtttttgtttgtatgcttcttattcattgttagtgctctaggcttctgtgagaacttgactactgcataatctctctgagactcaacttccttactgtaaaatcgagaaagcactgcattttattcttcagagggctactggggttattagaccgagatgattcgtggagagtggcctgccctgtgcccgatacagaacaaacactcagatgttaggtgacagtaacaagaataatgtcaatatcttcagaaacaaagaactaaccctggctgtgaaagggtttgtgctttggggtctgtccttgcagagacggtagatgggagacccaaggagacactagcatcctcttttgcagaaggttctagcagatgttgtggttgcaacaattggcatcagtgacttggagctgaaacctggcttgtggggtgctaggggagatctaggggcagcctaactcacctacccgcttcctcctccgtcctccgcagcagtgagaaacgatccgggaaacagaaagcagaggcgaacaatatatgtcacgaggaaataagaacactgcaccactagaataaataataatattttttccctggctttaatgaaactctatagatataaaaagctggagaaagggattttttttttacagaccttaattatagcagggttgttagtaaatttactgaattgcaaatgtaaaatattctgatggcctgagtaaaaccacatatttaagccttctaaatgaacatttctgttttttgagtaatttgtaccatctgtgtcaaaattctgagtctaaaaaaaaagcagtggaacaaatgttggttccataaaacagtcctagttcattgttgaaattgtcacacattaacattgcaggccatctgggaagacaaaagcctctaaccagattgcggagatgattttattggtctggtattaatcaggatatggcataatatttaagcagaaaggagagatgaggtgaagtggggcccttcatccaccccaactgcgcgcgagttgtaccagagccccctccactagggcgtggggcattttaaagccggtttcatcatcagaaaatgtaaataaaagccaaggtaatatttccggtttgaacagaggcacacaaaacacagaaacttcatgggttaggcggctggctcgggggagggagagctcttgttcagcggggtctacccagaaccacgccgaaatgaggtggagtggagcttccctttatcaccgcgcatctgaccctgagcgtgagagtcctcatgcccaggacggtcccctgctgctcaccgtccccgcgggtgcacagtgtcgaggccagcctggcctgcggcaagactcaccacagccagggttcagccctgacagctccaacccctgcaccttgggtccccttcctcttttgcactgaggctgagggccctgggccacagcagatcccagccttggtcccgctggatcctggcaagtgcccaggtgcagctcccatcagctcaggggttggtggcttggtggaggcaactcttgaggcaggtcactttaggattcacctctgagtgacaggggggttagaggtcacagtttagattatgtgcgtcttcctccggccactccacttgggcacacgcccctgggtgagtgggctggtagtcaaggatctgacattcgcccgatgggtcccactttctatgtacctctcagatctccgcgcggatcatctcacagcgcagagagatgcctgggcttaaggacgtatttttcatacaacttgcccctaaatgcaagccatcaatttcatcaagtgcttaatggaaggaacatggtctgccccaaatgctggcttgtgttgaacccactgaggggagggaggtcggcgtcctgggtgatggcttcctgagagactttcaagggaacttctgactttgtgctaacttgtacacactgtaccctcctgtgctgtgtggccctgtgtgattggggactcaggcggaggtgtccagggtgctgctgggagtgcgtctcctgggtccgctgcggggtggagagctgcagcggccaggtctgccctgccagccttaggccttcctgccaggagaagatgccaccccttctgggcagctttcaaggctgggggaacgcggtgctccctgtggaactgccttcatacttggttctttatctttgtccatctggaggttatgcacaaataaatgccttatgcagactgatggccttcacctttgctccaaatgctggcatatgtagagtctcttctcagcatctcctgcatgctgagccctgttgcagagggaagggagagccctggccacagggcgttgagtccagttttcaggaaaaacttaccggaaacagtgaaggacgtcacaatgggaaatgcaagttgctgggtccccagagctcagataatgagcatgagaactgtgggatgcattaagagggacctcctaaaaataagaacctgaaggccgggcacggcagctcacgcctgtcattccagcactttgggaggccgaaggcaggcagattgcttgagctcaggagtttgagacgagcctaggcaacatagtgaaaccccaactctacaaaaaatagaaaaaaattatccaggcatggtggcatgcacctgtggtcccatctacttgggaggctgaggcaggaggattgtttgagcccaggaggttgaggctgcagtgagccaagatggcacctctgcactccagtctgggtgacaaagtgagatcctgtcaaaaaaaaaaaaaaaaaaagaaaagaaaagaaaaggaaacatgagaccttgtctctaataaataaataaataaggctctatctctgaaaaaaaaagaaagaaatcaacagcccatctcttaaaacagcagcaacaaaatggacacagatcacacttctctgctatataaaaccctttagtggctcccacttgccccggaaagagaggccagagtccctgagaggcccttgccccctgggcttccatgggaggggccttccctgctcctccacaccgcagggccattgcccctgctgtgctgtctgcctggaagccccttgatcaccagccgggtcagcccggccaatctcttttcttctttcaataccaacacaggcagagcttctttaaggatttgttcctctggtctcatagcaccttccactcctcccttgctgctcgtaacactgttttaattaagtggtttatgatgtaattattgtttgtgccttcatgtctgaacacaaggagatcaactattttcccaatgaaaagatgagaacttttttggtgggggtcttgtttgtatatagaaactcataaggacgaagtcaaaatagtccaatgcttctttataatagttattaactatgttgcaatgcatacttgaaatcactttttttgagctagggctttattctgtcacccaggctggagtgcagtggtgcaatggtagctgactgcagcctcgacctcctgggctcaagtgaacctcctgccttggcctcccaaagtcctgggattacaggcatgagccactgtgccctgccccgaaatcaatttttttttaaaaaaattttctttccataggttattggggaacaggtggtgtttggttacatgagtaagttgtttagtggtgatttgtgagattttggtgcacccatgtccggagcagtgtacactgcacacaatttgtagtcttttatccctcacccccttcccatccttttcccctgagtccctgaagtccattgtgtcattcttatgcctttgcatcctcatagcttagtttccacttacgagtgagaacataggatgtttggttttctgttcctgaggtacttcacttagagtaatagtctccaatctcatccaggtcgctgtgaatgccattaattcattcctttttatggctgtgtagtattccatcatatatgtatactacagtttctttatctactcattgattgatgggcatttgggctggttccacatttttgcaattgcgaattgcgctgctataaacatgtgcgtgcaagtatcttttttgtataatgacttcttttcctctgagtagatacccagtggtaagattgctggatcaaatatccagtatctacaacgaactcaaacaaattagcaagaaaaaacaaatgattcaatcaaaaagtgggctaaggacatgaacagagaattctcaaaagaagatatacaaatggccagcaaaacatatgaaaaaatgctcaacattactaatgatcagggaaatgcagatcaagaccacaatgcaataccaccttactcctgcaagaatggccatagtctaaaaataaaaaaaaaaatagatctcagcatcgatgtggtgatcagggaacgcttctgcagtgctggtgggaatgtcaactagtacaatcactatggaaaacagtgtggagattccttaaagaactaaaagtagaactaccatttgaaatcactttttatgcaaggaagtacactcactgggaatgcttttttattctcccatgccaggaataaattgcactaaaattttcacacagtgccccctccactttcactgccttggctctcgggggagctgttttctcaggctcctgccttcagtggtatggattcatttgaatccctaaagatgctttggctcatgcctgtaattccagcactttgggaggctgaggcgggcaaatcgcctgaggccgggagttcaagatcagcctggccaacatgctgaaaccctgtctctactaaaaatacaaaaattagctgggcgtggtggtgtgcaactgtaatcccggctacttgggaggctgaggcaggagaatcacttgaacccaggaggcagtggttgcagtgagctgagatcgcgccactgcactccagcctccagaaatgcatccaaagctgtgagctccatttgggatccatattctccataaaataaccacttgacttattttcctatgtgacccttaaaagactgctttcctgtgacacctcgcagctgcagttttgagaccacaccccctccccaggaataggtatttttgttctgtttattttctttccccgtttttttttttttaacctattccatcaggtgacctctataagcatccaacattagcactgacggcggggcttgtaggatgaataggtctcttcctttaagttcaggctgaacggaattgggagcagagccctgcggtaggacagagacttcgcaaagcccggagcacacagcagcaccccgtcttctaaaggacaattttgggaaaactcttgcctaatattctggcactaaggatcattctgtcacatccccgctctggactacaagcctgcaagccccatccggggcagggctcctcattcctgtgcaccgtggaagccctgtgcctgcccagggcctggcacttgtacgtacttgaaaacctcgtgtggagtaaagagaggggtgatgtgcaaaggccttgaagtggggaagggtagttgaggtggctctggactcagcatggtgacaaacggagtggggaggggatggtccttcatgaagcagagtgaggaggcactgtcacacatgcatacacacacacacagagacatccacacagatacacacagacacagacagacacacagacacagacacagacacacagacatatagacacatagacacacagacacacacggacacatatatagacacacagacatgtacagacacacatacagacacacagacacacacatatagacagacacacacagacacagacacatacacagacacaccgacacacacagacatatagacacagagacacacacagacacacacacacagacatgcacagacacacatatagacacacagacacacacatatagacacacagacacacacacagacacatacagacattcacagacacacagacacacacacagacacacagacacacgcagacacacacagacacaggcacacacaggcacagacacacaggcacacagacacacagacacacagacacacacacagacacacacagacacacaggcacacacacgcacagacacacagacacacacacagacacacatatagacacacacacagacacacagacacacacacagagacacagacacacagatacaaacagacacacacccccacacacacagacacagacacacacacaaacacacatatagacacacagacacacaggcacacacacaaacacagacacatagacacacacacagacacacacagacacagacacacagatacaaacagacacacacacacagacacagacacacacacacagacacagactcacagatacaaacagacacacacccacacatacagacacagacacacacacagacacacacatggatacacatagacacacaaagatacagacatgcacagagacagacacacatacacacacacacacagacacacacacacacacacacagacacacacacacacagacagacagacagacacacacacatgagagctccagaggaaaagtgatcccaggccaaacagaagcctctggaagctggagcaggggttctgggattgtacccctgcctgtggccacagcccttgctgggcttgcccagtgataagcgcggaccaggagctcttctgagaagcccctcctggcgagacgttgttgtgagcctgctaatgtcttccacttaagcagcagccaccgaggtgtgccgcttcctggtgcctaatggcccggggtgtcgccgagcactattaatcccgctggccattaattccgggaaatgctcagggtcattacaggctgtgtggcttccaatgagaagtaactctgcaaggtgagcgcccaggccaccggccccaggaatggcctcctgcagggaggcctggtaaccagggcaggagggggtgcctggcctttgcacgtgtgtgtgtgtatgtgtgtgtgtggcggggggaagggggtagcaggcatgcacccaacatcaggggaccacatcaaaatggggagacagagatgtgcagcaagggctgttctctgcaaggacccagagagtcatcccctaagtgctgccttgaagcagcacgtggcttggatgtgggggtgctggggcaaaaccggaaggaaggatttttgctgctgcgagtggagggccggggacagggagaaatattggagaagggttctaggtagccttggtgtgatcttcaaagtgttaggtagagagtgctcagtttcccactctggtgaaagacaaggaggcacagaagggctgcagcagtgccaggcagagccgcaggctcgggctatgggtcaggacaggcagcagttccgccaacagcggagggtcttgtgcttttgcagggcagccactgcgtctcactctgttcctgctgtcccgctggcccagccactggctctcaacctggatggcctctgctgtcccgtgacctctgctgccccatggcctctgctgttccatggcttctgctctttcatggcctctgctgccccatggcctctgctgtcccgtggcctctgccatcccgtggccaccactgtcctgtggcctctgctgccccgtggcctctgctgtcccgtggcctctgctgttccgtggcctctgctgttctgtggcctctgctgccctggggcctccactgtttggtggcctctgctggcctgaggattctgctacctggtggcctctccttattgtgttttctctttataatatgagatctggaatcaggcctcccggtttcaagccttggcgctcctgtttcctagctgggtggccccgggcaaccgactgacctcctctgagcttcagttacattacccataaaatgagaaaaacaacagagcgttatgaggattaaagatgacaacaagtagatcatttgggaccagcctcgaacacagcaaaagctctgtaaatgcttcctcctcctcctcctcctcctcctccacttttcctctcttctgattttattgtttctgttattctctctgtgtgtcttctggcctcgatccctgactgtgaggctcatgggtgtcctgtcactgcctccgcagaggggctgggctgggccattatgcactttccagaaatgaacgtccctgttgaccagagtggcctgtcctcgggccatcgctggccacttgcggcaagttctctttggaagaaaagccaacctccagtttggtgaaagtgtcagcgttttggggtgcagagcatgtgaccctaatgtaagccagcacccctggtccctgccttgggagcactgtggtcctggcgcaaaccagagcacaagtccagttctgtcccctccagggtccctccctattcactgcctcagtgaccaccacatgggcagagcttgcagtttagccagcactgtcccagttcacctcaagtctgagaggtcggcctggccaaaattcaaatccccactttcctgatgcagaacggactgccagagctggattttcaacacagggccgccaagactggggccagctcccgtcccactgtgccacaccgtgtttgtgcgtttgtgaccccgtgaaaggcagaaccggctgctgtcgtgtgggtggatggagatttgggacaaggacacagacacagtcggcagagagtttgaccccagatggaggaatcgggtttggctaaatttctctggaatccttcaatgagtctggcttgctgctatctttaatttcgaagaccctgctgagggctggccccaccaggacgtggtgctcggggacagcagcccccagggtcctgaggcagcttttcctctacctggaccccgtttctttctgggctcagtggtgcatctcagccaggactctgctcaggctgactttcccgaagcccagagagcagggagcggtggcccccaccatgagtgggctggcagtgggtgtcacatgggggcggaagagagggaagtctgggaaataatgcccagccccacccactgaaggaccgggatgcagagaaatgtcactgctgctacacaaaagtgcggcattatcagccccttgcaaaggcaagtggattaaaatgccattaacacagcaaattaagcttacagtgaagtaaacaggaattaaatcaataaccagcacaggggacagctgaatttttccaaatggtcccccggggattggggctagtgggtgcatagggtagggggcagggtctggctggagaggggagggggtaagtgacatgcttagagattgaaggtccgggcactggcaatgggtacttggagggttcaggctgagacctgtccctccagtggggagcagcttcgcttcctgtttccacccaggtggctccccctgtttcaccagctgtccatacttctgaaagtgatgccagatagatgtcacctgcttggcatccccccactcttcctttgtcaatcgcacctagattcttcttcggggacactccatgcccccaaaatctcttagtctgtcctgttcagttagacccactctttggccgcaggctgtcccttgcccaggcttatagcacaagagaattgtgtccctatggtcacagcatttgatttggggatgttcagccaatccacatctgtgccaagaggcaacccaaggactttgactggagccttctaaaatgtcctgaggggctgctaagctgatgggatctggcattctattgcaccaggagagcttgggctgggagtgggctgagaggtaaggaggtagaggctggatttgagtgcctggatccagctgtgcctgaagctatgctggattttcccctgcattctattttttttttttttttttgagataaggtcttgctcttttacccaggctagagtgcagtggtgcaatcacagctcactgtagcctcaaactccctggcccaagcaattctcccacctcagcttcccaaagtgctgggattacaggagtgagccaccgtgcccgatctctccctgcattcttcaggaatctgaacctctctgtctcccatacttttattcttaagctagtttaaatcagaatgtggtcatttgcaactgaaagagtctagcttgaaaaataattttatttctttttttttaaaaagaaaattaatttatcaaacatctcttagggaccattgagcatggtggtgtcccttggtctcccttgcctgtcttttgcagtctggatgctgtttcctcatctaccctatggggttattgtgttatgccctaccagcctgtgtggctgtccctcctcaggccacccatacatgcatccatctatccattgacccatccaccaattcatccatccatccacccatccatccatctacccacccacctatccatcatccactcatccatccatccatttatctatcatccatccatctatccatcagttcatccatccagccacccattcatccatctacccatccatctacctgcactcccgccctcctcaggtgtacatacccatccatccatccatccatcatccatccacctacccatccatccatcatctacccatccatctattaatccatccatccatcattcatccatcctttaatccatccattcatttatccatctacctattcctccacccacccatccacccatccattcatccatccacccattcatctatacatccatccatccactcatccatccatccactcatccatccatccatccactcatccatccatcccccatcaatccattcatccatccatctatccatcccccatccatttctccatccattcattcatccgtccacctaatggagccctcctctggggcaggtgggctctatgctgggctatctcagcccactacctttcaagcctctgatttaatacatcttaggcaaaagaagaatctttaatgggggacacacggatgggttcttattccttttcctttcaggtctcttattcacctgccttaccgcagagctcctggagaaggggtaagacccaggactgagaacgggatgactttttctcctggcagctcctaccgagatccaagccacctccatctggaagcctttcatgactgtcctcacatctgggaaggcacctgccctctctgtgcgtctggggccccagggtcttcctttgtcaggctgctctgtgactgacacttcccgattctgccccctctctgttttgtgagctccttggaggtagggatcgaagcttttccctccctctgggctccagcacggagctcagggtgttgtgcagagcaggcctcaatatgggcctgctgagtaaatgaatgaatgacacccagtcgcagatgcttttcttgaggctctgattataggttctgacctgcgcttggggcactttttaggggccatggcttccctgtggggatctctgccccaccatccccactctctccacctacccccccttgtttcctcttttctaaagagactccttggccctgccttgtccagggcaagttcccacggtttcaggcagtggagtgggctgccttgaggaactgtgttttggggattgggtggcggtcagggtggagggtgcaggggactccccagaccaaggtggcatgatcaggacacgcttttcactttgcttggttattggttttccagagatgcttctaggaacacttcacacagatggagggaggccattacaagggtgattgttactgttcttactttttgggggaatggtgggggtgaagcatgcaactgccttgcacctcataggcaaggggttcgcttgctaaaatacccttctatttccctagcttggctccaactgtctggtctgtggccaccagggtctctggaggcctgacacccccagtctggacacctcgaagtgaaggggagaccaggggccgcccccaccccaactgccccacggacgcgatccctggccaggtcagggagggaaaaagaaaacgggtccaactctgaagagttctgcattcctctgttgatttttcccctctccctccctcaggttccaaatccaattctagctcctggccaactggtagaattaagggattaagagctacccaggtcttatcccgatatgaaaagatttcaccgagaggctcatagttcagcatccaaagccgaggaaatcgctctccgcctgccctggtattgttttgcaagcctcgctggaaccaccttttgagctcctggctgaggcatcgctgtttcacttatctcttaagacctcactcataattgctcaatgtccgacaagcagagagaaccctgggcattatctgttaagggccctctaatccagttcataaggacagagtgtaatcaggacacctcaaaatctttctaaagtcaacgcagaatgtcacatgagccctgagctgcttcctggcgaaccccggggaccaacacagatgccagccctccccacctcaccgcgggagggcacatggggcttgaaggcttgtgtgggcccagagcgagtgccggttggccagagagaccagaccaacttatgggggaaaaagactttgtattaaaaagcagaagggaatttttagcatgtgccagagttggtatgtaacttcatatgtgtgtgtgtgcatgtgtgtgtacataggtgtgcgtgcatggactttctggacaaaattaaaatgagtgagccctctccaggctctcatgagtccactgggtcagcttaggcagcaaagggcccccacagccctgggcacagggctgtatagctggtggcccccgacaggcaaggtggcagaggtgtggatgagtcagaggctgagtttctgcaggcccacgggaagctcgctgacaaatgctgttaatcttcggcagggcaggggcacctccagcacggagctccatatgggcgcacctagatctatcagtcgactgtcgactgccgcccttcatgggacacgggcgcgtccctctgactgatggagcctttctgggggctcacggagactctgggcaggtgcaagctcagatgccagaatcccctggcacctctcatcggttcatccacctacaactgacaaatggagctcccttccccactgcacaacagggaaggatggctttaaaacagcccgcaggactaagctgggtgtcttcttcctgtctagggcctcacctggccagatcacactctttccacttctctgatgtgagccagccagtgtggtggctgcaaccctcttctgccctccggacatgtggctccaccccacccatctctctggatgcctgagctcctgagtctgggctctgacagccactttccacccgctgatggctcccctctgtggctgcgtgctcagagtgtgccgacgcatcctgggattcctgcatagaaaataagaaagggctggtgtgtgtgttgacgtcttggtttgggtcccccagaagctgacctcaagacgaggatcccgtgaaagtcattgatttgggaggcaaccacagtaagtgtggtggggaggggaagtgagaagagaggagaaagccaccaagcatggcacaggatccacaggcaccagcatgcaccgagctcccctccagcgggggtgtggggaggcgccattgcacctgccacagggtgttccccaggaagggaagaaagctggcaggaatgctgccagttcctgggtgagggttacccccaagatattagttacctggcccttctggctttgaaggccaggaatttccaagatcctggagaagttctcagggacagaggcatagaacctctgcctctggccttgggaaagtgcaggtacatgccagctgctgaggtctgagagatgtgggcagggaagagccagcgttggctctgatggctttcctaggtcacatttcctgggcaggttggttagggagatgggacaatgtgtatatgagtggcaccaaggctggattctgctggccagctttcagctcttcctgtgcaaatttctggaggcctggccctcttgctgcctggttaggaccctctttccaaggcaaacacagtccccaccctctgatctagatgactgaccatcagccaagggcagttgcagttttggtgcaggccaagacaggcactgaggtgtgaccttgagccagtgacatccatctcagagccttgctctctccacctgaaaaacgggcaccttgcagataagcaaggggtagcccagaataatccacagtattggagatgaattcgggacattggtgtgcacttctgcttagcctaatataaatacagatggatgcacgtaaaggtattttagatatgtctatatacaggggttagtgtacacacatctgcttcctggctctgtccaccgagagggcctagaaacaacgacatcccagtaataacacctaccacccgggccttggtttctaataccatcctcaaaaccaggagccagaattcgttgaagaaacagcccattctaggattgggacaggaaatgtcagataagcctgaagcatattacagtgccaaaaagtagagtgtgcacacacacacacatatacacaaatacacatatacacatacataagcatacacatacacacacacatagacacacacacatacacatatacacaaacacacacacatacacatagacacacatagacacaaacatacacacacatacccatacacacacatacaaacacacatgcaatggtggggcttgtcaaagagatgtagggatcaatgtaagagcccccagtggccaaaatcagaataattcgagcaagaaaaatgtagtattgcattacaacccaaagtacaggccgggtgtggtggctcatgcctgtaatcccagcactttgggaggctgaggcaggcagatcacctgaggtcaggagtctgagaccagcctggccaacatggtaaaaccccgtctctactaaaaatacaaaaaattagccaggtgtggtggtgggcacctgtaatcccagctacttaggaggttgaggcaggagaatcacttgaatccgggaggcggaggttgcagtgagcagagatcgcaccattgcactccagcctgggcaacaagagcaaaactctgtctcaaaaaaaagtacaaaatatatatccatgaatccatactgatataggtaagtagttgaataaataaataggtgggtgagaatagacacatcccgtgcagaagaattccacgtaattgacgtagatgcccctccctcgaggaggcggatgatcatcccagctcttaagtgtgggctgcacccagtgaccaccttcccagtggtacgctatggaaacagggttgagaaagaggagcttgaccctggagaaacctgagcccaaccaggcgaggaaagtcaggggcaagtcctcctgagagtgggatgtggggagaacggtccttatcccctgtggcctttctcccaagaacccatcagctcagtctaactgtgagaaaagtagcagacagccccaacttgagggacattttacaaaatatctggcctatgttcgtcagatctgtcaagggcattaaaaacaaggcaagtaggagaaatagttgcagtctagaagatcctaaggagacgtgagttctaaaagccacggggtgtcctggatagggtcatggaacagaaacagtacattaggtacaaaccagggaaatccgaataaagtgtggacttccgttaataatgatgtaaggaacattggcgcctgatttgtggcagatgtaccagagcaatgtaaaatcctaacaatgtgggaactctactatcttcacaacttttctgtaaatctaaaactattctaaaattaaaactttgttatggctgggtgctgtgtcttatgcctgtaatcccagcactttgggaggctgaggcagacagatcacttgaggtcaggagttagacaccagcttgagcaacatagtgagatgccatctctacaaaaaatttaaatattagccaagcatagtggcacacacctgtagttccagctactcaagaggctgaggtgggaggatcgcttgagcccagaaagttgaggctgcagtgagccatgattgcaccactgcactccatcttgagcaacagaatgagaccctgtctctaaaaaaaagtttatcttaaaaatggggcacctctcctggaaggcagctcagccattatgaaaggaccctgacctggcatcaggggatttgtattcttgtcactaagtgactcttccccgctgggcctcaatgtcttcatctgccaaatggcagggttgaatttccacgtctgatcttggctgtctgtgatttccttcacacctggcttgagttgctggggaaaacttttaaagaagaggggcacagctgagggcatcttttgcagagcgggtggctgaggcgcatcgtggctggacctgagtccatctgccctggtgcctgcatgactggcccttctccttcacagaccatggccccaggctcccttgctttcatttcccagcccgttattggggcaggagagtagcaagcgggggagttttgatgaggcgaggaagcagtgatgtgttttaatgcactgtttcctggggacctagaatgaaaattttaacaactcagaagctgtgcactgaaggcgcccctgctgcaggttctcagaagggtattccaactaaattgcagaaatataaatatgcatcttcctcgcttttgatgagctatcactgcgcagagcccgaatccccaagtggcaaggtgtttttccactcaatgggagaacagccatcttcggttggcctggctgtagtgctcctcagctgtgtttgcactttgtggccataaggccatgcgcttcccaggacctgccgagagctgaccttctgtaccaagctgggagacagcccaggaaagagaaaaggcaaaaaattattttaaaaacaatacacagaggctgggggcagaggctcctgcctgtaatcccggtgctttgggagtcccaggcaggaggctcacttgaggccaagagttcaagaccagcctgggcaaccatagtgaaattgtatctctacaaaaaatttaaaaacttagccaggcgtggtggtgcatgcctgtggtcccagctactcaggaggctgaggtgggaggatcgcttgagcccagtagttcaaggctgcagtgagctatatacagtgagctgcagtgccactgtattccagcctgggggacagagagagaccctatctcaaatttttttgttttttatgttttttgtttttagactgagtctcactctgtctcccaggctggagtgcagtggcacgatctcagctcactgcagcctacgctttccaggttcaagtgattctcctgcctcagcctccaagtagctgggactacaggcaagttttaccacgcccagctaatttttgtattttttttttttagtggagacagggtttcactatgttggccaggctggtcttgaactcctgacctcaggtgacccacccacctcagcctcccaaagtgctgggattacaggcttgagccatcacacctggcctcaaaaattttttttataagtaaaaaataaagataaaaaatgaaaaacaatgcatgaagatgcccggcagaaaaaatagggttttacaggataagtcattacagtgctatccatccacagggcctacacacaccagctaactcttaagcttgggcaaatccttccagagaatgcaggggggaaaactgtttccgtaaaaccttcagcatcagagccaggcacaatgtggaggagacccaatccagggctctatgggatgtatacctttccctctccaccaaggctgtgaagtccaggccctgtgcccctaagtgggtcgggcccaggatctctggagtctggacattccacccaccgtcccctcatggagctgcatttctccggccttgggcctgagcctggtttcacagccttcttcagatacctgcggagacacttccaagacagcaccgtggtggtgtttaatgaatggcaaacactctctcacaaacagaaagaaaaaaaaaaaacctccacaaatccccaaacctgttagctggaaaatattccaagatcaacacattttaattcactaattaatacagctaaaaggcatttttcatattagacttattaaaatcacttgtatttaagtgtttttgaactcatattttccgatgctgtgcgttttcctaaagtgttctagtcatgttatgcaaatgcctatttaaattaccaggggtatttgttgtctatttctactctgtaaaacataattttaatacaagttatttgtgaaatgcacattggaaaaaagaaaataagatttgagatggcatttctatgataattttattgcaaatgttgaccatgtttttgtatttgtctgcaagaggtaatgcaaaatatacataagacatatttccgggatttattgttatatgtgactaaattagtaaagcaaaatttgcttcattgtttgaacccgaggcagggcagtccgtcaccttgtgaagcatgttttagacgaacagtcacggccacgcagcaggcggaacccctgccatcccagaaagaaaatttgctcttgctctccactgaaacacgattttctgatacctgtgtgctgccaggcatgatgtttgaggcataaacccagacctttgccgaggacagggagactcggcttgagcaagacaggagtgctgaacggaagacataacgggggttctctggagtgataaggtggcaatgtggtggccagacttcagggcacagggagtcctgggaggggcttcttgaagggtctttctttgtctacttatcagaaatatgtagccttcctactaccagcgtttttgatacacatgtgatacaggcataataagatggctagaagcaaaagatgaaattgagagagggaaccctggcagaaatgctatttctgagcttcctggcagccaaggtgaaaaaggaaacataatgagtttaatgacactaagtctcccagcactttgggaggccgaggcgggcggatcacgaggtcaggagatcgagaccatcccggctaaaacggtgaaaccccgtctctactaaaaatacaaaaaaattagccgggcgtagtggcgggcgcctgtagtcccagctacttgggaggctgaggcaggagaatggcgtgaacccaggaggcggagcttgcagtgagccgagatcccgccactgcactccagcctgggcgacagagcgagactccgtctcaaaaaaaaaaaaaaaaaaaaaaaaaaaaaaaattacactaagtcattgtccaggtaaaaaatgtctaccttttgggaagagggatagtttccccctagtcttctagtctgagtgaaatccaagaaggcccttcataagggaaaacaaggacacagcaagctctgttcccagcggtggtgagcttacacaggctgcagaaatgtcctgaagggctgggcacggtggctcacgcctgtaatcccagcactttgggaggccaaggcaggtggatcacttgaggtcaggatttcaagaccagtggaggctgcagtgagctgagatcatgccactgcactccaaccttggtgacagagactctgtatcaaacaaacaaacaaacaaaatcctgaaggaagatggttgaattgaaaccaaaggtatggtcagtcacaggttttaaagattttcctgcggtgttgttggggggacctgtgacggaatgagactctgtctccaacaccccaaccccagtcctacaaggacagtcactctcacctgtgtcgacaggacagacactgagattttcccaagggggagaggccaccatccccagtgcgggctggcggtaggagcactgtagagcctgtgtcctagtggggacagcattctcttgagtgcttattccttttaggtgccagtggttaggggttataaaaagtgtggaaacacaaactctgctacctgttacctacctgttagctgggacagcccttccatcgatatctgtggaatgagaacttggtttgctctagagaaaggggcttcccaacatcgcctgaacatacacagcaagctcttgttcacaatagactcaattcaattcccttcctttccctttccttcctccctctcctcctccctccctcctcctatccctcccccttccttctccctttcctcccccttcccttctctttctttcccttcccttcctccctctccttctccctccctccctgctcctatccctcctccttccttctccctttcttcccccttcccttccattcccttccttcctctcctcctccctccctctctcctcctccctccctctctcctcctccctccctctctcctcctccctccctctctcctccttttcctcccccttccctccccctttcttttcatccgccttcccttcccttcctccctctcctcctccctgtctcctcctttccttttcccttcccctcccccctcactcccttcccttcccttcctccctctcctcctccctgtctcctcctttccttttcccttcccctcccccctcactcccttcccttcccttcctccctctcctcctccctctttccccttccccctccccttctcccttccccttccccttccccttccccttcccttcccttgacaaggtcttactctgtcacccaggctggagtgcagtggtgtaatcatagctcactaaagcctcaacctcctgagctcaagtgattctcccatgtcagcctcctgagtagctgggactatacgaatgtgccaccatgctggctaatttttaaaatttttttgtgagagacaggttctccctatgttgcccaggctggtctcgagctccaggcctcaagcaatcctcctgccttggcctcttaaagtgctggtattacaggcatgagtcaccacgcccagcctccatataggtttctggaagggaactgacaatggagactgctggtgcgggtgggccaagccgtgggccagtctggatttacagaagctgtgtggttgtgggccaggccttcactgctctcagtctgtccctcataaggtgaggacgaaccctaccatgcagagacataaagatgacaaaacacttgcaaagtacctagcccggtgcctgcccgggcagctggtgctgatggggcacccatgaagaccatgatgcccagatgacagtaagggtggcctgtgggtgccacttaacttccaaagcacttcatgagccagatctcattaaagccatgttgcaattctgtaaggttaggtatagctatcaccacccccatttcacaggaggaattggctcagagaggttcagtgacttaccaaggaacgcacagcatgtcaagagtgagcctgggatgcagagcaggtcttccaggtctcaccgggcagcactttaatcctctcccttcactctagaaagctgggtggacctttgggctgggttcaccatcttcaagaaggaggcagcttcggaggctggcatgggtccaggactgcatgtccagccctttggaagtgtcaaatctggacaagaggtgggacaaggcctcggagccagggactgaccacgggcttggaggtcatgttctatcttccctgttgcttcccctcctccttgtaccaacagggccggctaattaggcaaggcctgtggctccatatttaacaaggaaggtggagggaccctggctgtgtgtccccccctgactttgtgtgccccacaccacccaaacctggtcaatgagcaacgcctgccccaggccctggagcccgcaggcttagtttcctagagtctccgctgttgcactgggttctatcactcaaaagggcactctggatgggcctattcagaggccattgtctggccagcaaagctgagcatgtggctggagggcattagcccccctggtggccacatagggagacccaaacaaaaggcctggactgggaagtgcagaggccgtgacagcaattctaatttttgaggccttttgaagcatcggtgcgctcggagagcctcttccctgtatcattcttacgtggatcaacagatgttttaaaacagagctcctgatgcaggggaatcctggcaggctgcctcgctgccctgagagggggctctgcagatgacctcaggtaggcgtttgctgagcgccaccatcctggcaaggtgcacagctctcatgatctgctggggagggtctccctcctgggccaggcctcactgaggaccagcccacaggtctccgttcctttcctccccttctgagctgctgtcctggcctctgagctggtctctcagtagcaggaggagccgacagaggcaagggcctgtttccctgcaggtgctgtgtgccttcaacacgcagaggctctgagggccgggtctgcagacacccacaagggagtcagccaaggccactgaagtccactcagaaaaaaccgctgctctccacagggtgacttggctttcagtctccagatgtttactgagcaccttctctggaccaggctctggactgggctcaaggtcctggagggaccgagacagatgtggacctgatcttgggtttcagcggctggaggtgaagacaaacactcaatgttacaaatgctaagttaatcatcacagcttgcaaagtgtgtcaaaggggagacagttggccatggctcatgcctgtaatcctagcactttgggaagccaacatgggtggattgcttgcggtcagaagttcgagaccagcctggccaacatggtgaaaccccatctctactaaaaatacaaaaattagctgagtgtggtggcgcatgcctgtaatccaagctacttgggaggctgaggcaagagagtcccttcaacccaggaggcagagtttgcagtgattgtgccactgcactccagcctgggcgacagggtgaaactccgtcttagaaaaaaaaaaaaaacagtctagtggagccctcccctagaaatcaagcctgaaagaagactgtggggcacccatctgcctacctgacagctgtttagtaagctcctactgtatgccaggcactgagtgaggggctcggtgtgcacagcgaaccaagcctgacaagatcatcgttccgctggagtgtatggtagcgtccagggtgcagagaggtatgctgggaacagcaaagagataccttcatttaggggagtggtgaacagtgggatgaaagaaataaaataggcaatgtagtggggtgctgtgggtgtggggagggcctcctacagctgagggaggcaggaaggtctctttgcagaggtcatatgggagcagcagcttgaatgaagtgagcagggagctggggagagggagagtgcccccatggaggaaatggcaaatgcaaaggccctgtggcaggcaggaaccaggcaggttgaaggagaacaaggagcccagagcgcctggagcatgtggcagggacaggccgtgaggggaggtggaagagatgcacatggaccatgaggctctgcaaggccagagggggccatctgaattctgcttctcatgcaatgcagagccactgaaggggttaagagaagagtgacatgatttgcgttgtgttaaaagtaaatcccagctgtctcagaggctcacacctataatcccagcactttagggggcagaggcaggaggatcgcttgagctcaggagttcaagaccagctgggcaacatagtgagaacccatctctacaaaaaatgtaaaaattagtcaagcatggtgacacactcctgtagtcccacctactcaggagactgaggtgggaggatcacttgagcccaggagttagaggctgcagtgagctatgattgcaccagtgcactacagcctgggtgatggagcaagaccccagctctaacagaaaagaataataaataaataaacaaatccctctggctgctgtgtgcggaaggatttacagaggcagcccagctcagggataatggtggctaaggctcgagtggacacagggcaggcgggatttgaggtgcacctgggagccagcactgcctggacttgctggcaggttgtgagggaggagtagtaggaaggggagagcagcgggatctctgggtttgtggcttgagtaactcacccagagagcccacagtcggagccgtctgccatcaccagtcaatgtggagggagcaagatctgagtggaggccacctgtgcacacggtgtggggaggccccgtagtcctgggagccggtaggaggctgtttgcttgtagcagagccggggaaggtctcacggagtggggagatctgagctgtccttgaagaatgagtagatgttgggctgtgaggaaagatgaagggatggtgggaaggcagctgaggggaagatggaagtggtgtgggtttgggtgggttgtctgtctggcagggagtttatggagcaacatggggctgatagaaatggcccaggttttgtgtcacggcctcaaatgcctggataaggaggccagatttcgagtgcaggtgtgagtaattccggcagaccagaagggagagcaaagtgacaagtccaggtcaagctgagaattcccaggacatggctctgtctaagcattgggccttcccctttctggacccagtcatgagaggcctacgaagtgggccactccccttccatctggagatggtggattctagagcaggggaaggctgtggagctgtctatgtccttcttaccctgtcctgcacgtcctgcacaatctggtcctgtgagtgcttctccctcatctccagtcctctcccatccctctgcgagctccaggcacactgactttttgctgtttcgcaaactcaacatgctcctttgcgccccagggactttccacatgttcctccctctgccagaaagcttcccctccactccttcccttggctgattgcttcgcgtcattcaggtctctgctcaaatggctcctcctccaagaagcctccctgacttacagctccaagcccttacccattccgtcctcatttcgtcttctttctggcacatatcacagactgagaccgtgttgtttgtttacttgcatcattgtatatctactgcctctgccccaatcagaatggaagtctcatagccttgagaatttgatcatcttggttactgctgtgtccccaagactggaagatttccctgcacaaagtgagtacccgtcagtatttgctgaatgaataaatgttttggggccccaccttgacaattgggtgaacagaccaagcccccacccgcaacccccaggagatctggcaggcccagggcagtcccccaggaccccagacctcctgaccccagtcctgcgctctgccgggaggtttgctgctctgccctccctgggggtttcagcagcaggaaggccaggggtgttctgggtttggtttttgtaattggttggatatgatcatgaaaagcatctaacaattggacagctggaaatgtttttcctcccatttattacttaaaacagccttggagtttctggttgtttttaaaatcagattctcctcacttaaaaaaagaaataaaaaaattaaaaaaaataccatgaacccactcttacatatttttgaagagaccctgcaaggtcatgacaaggcctctgtttgggggagttggaaggggggcttctccatgctccagagaaggcctgggagcgtccagagctgggtctcggccatcccgcagttgtagtatcaggaggggaagataaattaagatgagtgcattgcacagttagacattagccatgacagtgaaaaagtattgtgaatgttaaaacggcccagactaaaatataccgaggttaaaatacagggtaactttacaaatcactaataatttctttggctttcactgcaataacattgatttaattcattagattcctttctaaatctatatttcagttttagagttgtcagtttctgttaatgacaattttgccccatctgttccaacatgaaaatgaggctccttgcagcagacaagatagatctctaagagtttaagaaggagaaatcttaaaggtatttcactcagatgaggccctatttgatgattcacactccaaatgaagctgcccacagaaaacttttcctggacgccagtagagagatgaccccctcccccagtgactcccaagcattcctgtgcctgtggctaccccagtatcaaatgggcccctgtgtcatcttcgtctcatatgtggaggggaaatattcaaaacattctcactcgttcttttttttttttttaatgacagagtaataattcagggtgtcagcatatcagaattccagtggctgtgattagaatgacaatgagttgctgtgatctggccatttgaatcgtcatattacagtaagtcatttccgtaaggcctggtgagcttctgtctgctgaggggccaaaactcagtctgggttttcagctctggaagaaatgtctctgatattcccctccagtctgccagcctctatatctgtaagctacctgcaggagatagttttgtttcatgtggcttcttttttgagactgagtctcactctgtcacccaggctggagtgcagtggtgtgatctcgactcactgcaacctctgcctcccaggttcaagtgattcttctgcctcagcctcctgagtagctgggattacaggcacccatcaccatgcccggctaatttttgtgtttttagtagagacagggtttcaccatgttggccaggctggtcttgaactcctgacctcaattgatccacccacctctgcctcccaaagtgctgggatgacaagcatgagccaccgctccaggccaacaggagattgttttgaaaacatgggtgaagactgtgtgcccaaatccaccggcattggaggggtcagtgtgggcttggcacaagcccccatcaggaacgaatgggaatttaagagcacctggattttctgaagagcaggagaagccctgcccgtccagctgttcgggaggtgctctggagtctgcagcagggtcttgtgttattgggggaggacattccactccttgtcagctgtgaaaaaaatgaacccacccacgaaagaagacacagcgcatagttcatgacccaaggaagaggggatttctttaaacattcgaaaaccttctagaaaaatatgcaggcattaaaacatacatggaattaggccggatcctcaaagttaatattcaccacatgtatttacattcaactcaacgccagcaaattgagtactgcattacagcttggagaaagaggagattgcctctcacacaggctgacattaagttgagttactgttctgccgtagacttctccaggaagtcaaaaagacagttgagagaatcaggctgaaaatcctcctggtacatctacctcctaatttcaaatacaaattagtgaaattttaacatttcagatgtcataccttgagcaaattaaaaatcaacaaaaatattaaggttctatgttacctgctcaaatgtacagaatgtataaaaactttaatcaaacactcgggtttgctcagttttaaattgtgttagtttaatagtttcttttctgctgtttatattaatgacatattcccatctaaatatattgccatgctgaaaaaccatcacaacatttccaaggttgaatgaatgcagttgccttcatggttttttaataaaaagatctctttctattaagttccccctcttttttttttcttgttctccaaagactgaggagctctgcagtgtgtacagtagcattgggactgagataaatacacattgccaccacctcatttagtgtgcaaatgcctcctctgcagctgtgcagagctgaggaaccaccatttcctccaatagcccagctgaggacgaagccgcggaggggctagtggcaacacaaattgctttttctaagcatcgactgaaggtctcatcacttgggaaaatgtcttaatttgctcttcttagcaaagtggttgtatgcactctcgactctgttggaggaacctcgccctgtctagatacatctagaaggatgtgcacataggcatacatgcagggtagatgccaggccaggagaacccaccagcagtcgactggaggatctccaagtcccatcacaggcatggggtttaacaccttctccccagcacccacctggctatacttcccatgctgcccctctgattggagtctggtcctcagctctgaaaggcacaggtaatacagcctactgtgctccaatcggtctccaatttggcaaaaccaaagttaaactttccagttttacaaaattgagcaattcttagagttcagagcaggggaggaaaagtaaatcacaggtaacccaaaggttatttgaagataaattccctaggagccaggatactttgaatttgcctgcttctgggcttggggcagaggactccagctgtctggctgggctactcacaactaataaataggtgagctgtgcaagatggcatctgaggagttcccatgatgcaggactgtcctccatgggaaatagccgactcttttaatacaaggcaagctcaattcaatcacaagtgcattataactctaagcacaaataaatgtattattcctacatttcgttatgatgtaaagcgagtcctatgaatctaatcacttacaagttctgatcaaaataacaaccgttcatctgtctaccttttcttcaaagttatttttgagcttatcgaccattatagactatctcaatcacacagaccaaaatagataatgtaataaacacatacatgtttaaaacacccagttttatcaaaccttagcacaatgtcgtatctgccccagatttttttcaggaactgagacgttaccgcagcagtgtgccctggtgtccctcttgcccagggaccagcatcttcatcatagggagtttttaagtgctggtggcagcttgcggggagaggctgattgacctagaaaagggggtgctacttggcagtatcatcttcaacttctttcgtcctcatccccaggaagggaaagaaggaaggttccaaatgaaggacacacatttgacccgaaggcccagcaagaattgcatgttgcaatgtgcactgtgatctgcaggcgagagaaatgaggtgattaaagctaaaaatgaatatgcccgacctgggaaactagccttctgaaataattaggccatgagacgcaggatgagggagcgagattcaggtgtctgttgaaaaagagagagactctttccccccctcgtgtgccttttccaaatggctgaaaagtacctcagttgtctcctggaattcgttttagcagcaattcatttctgaccacgcaggacttgggattcaagatgtgtttttctaagccagttgtgatgagatccggggctttgctaatcaactagaaatatgactggatatgaaatctttacctgtttaagaaaattatatattttgagcaaattaattccatctggacagttacagcccataatcagctatgttatgcaaatagtatctttgtggttgaaatcaataacttattttcttctgtaataaagaaaaaagggggaataagttagtattaattatgtacaaaatgaaatattttcttgcaaggttgcgggtttcatttcattatgaaggctttccttgtgccagtttctaggatgctgatgagacccgtgcttcaggatgacatccctaaggccacctcttgttggggagaaggttcagggagccgggcctgggcatgcttctctggggaagcccgtccagcaatgccaggcgatgtctgccagcaccccctggcttgggctttttcctcgggctgtggttctgaggatcaccttatttataaagcttgctgggccacagttagtatcagcttcagttatagatgaagttaatgacagtattgattatgccataacctatgttaatagtgagtgtattacctcttagccatcgggccgtatttatgggctgtttcttcccttccaatcatggctgactcctgcaggaatatcatactttttttttttttttttttgagacagagtttctctctttttttttgagacggagttttctctctttttttttgagatgggtgactccagtcacccagactggagtgcaatggtgcaatctcggctcactgcaatctctgcctcccaagttcaagcgattctcctgcctcagcctcctgagtagcagagattacaggtgcccatcaccatgtccagctaatttttttgtatttttagtagagatggggtttcactgtgttgaccagcctggtctcaaactcttgacctcaagtgatccatccacctttgcctcccaaagtgctgggattacaggcgtgagccatcacgcctggcagaaaatcactctactctttcttctggtcaaaaggagtgtatcttttgttttttttttttttttttttttttttttaatgtttttttttttattatactctaagttttagggtacatgtgcacattgtgcaggttagttacatatgtatacatgtgccatgctggtgcgctgcacccactaacgtgtcatctagcattaggtatatctcccaatgctatccctcccccctcccccgaccccaccacagtccccagagtgtgatattccccttcctgtgtccatgtgatctcattgttcaattcccacctatgagtgagaatatgcggtgtttggttttttgttcttgcgatagtttactgagaatgatggtttccaatttcatccatgtccctacaaaggacatgaactcatcattttttatggctgcatagtattccatggtgtatatgtgccacattttcttaatccagtctatcattgttggacatttgggttggttccaagtctttgctattgtgaatagtgccgcaataaacatacgtgtgcatgtgtctttatagcagcatgatttatagtcctttgggtatatacccagtaatgggatggctgggtcaaatggtatttctagttctagatccctgaggaatcgccacactgacttccacaatggttgaactagtttacagtcccaccaacagtgtaaaagtgttcctatttctccacatcctctccagcacctgttgtttcctgactttttaatgattgccattctaactggtgtgagatgatatctcatagtggttttgatttgcatttctctgatggccagtgatgatgagcatttcttcatgtgttttttggctgcataaatgtcttcttttgagaagtgtctgttcatgtccttcgcccactttttgatggggttgtttgtttttttcttgtaaatttgtttgagttcattgtagattctggatattagccctttgtcagatgagtaggttgcgaaaattttctcccatgttgtaggttgcctgttcactctgatggtagtttcttttgctgtgcagaagctctttagtttaattagatcccatttgtcaattttggcttttgttgccattgcttttggtgttttggacatgaagtccttgcccacgcctatgtcctgaatggtaatgcctaggttttcttctagggtttttatggttttaggtctaacgtttaaatctttaatccatcttgaattgatttttgtataaggtgtaaggaagggatccagtttcagctttctacatatggctagccagttttcccagcaccatttattaaatagggaatcctttccccattgcttgtttttctcaggtttgtcaaagatcagatagttgtagatatgcggcattatttctgagggctctgttctgttccattgatctatatctctgttttggtaccagtaccatgctgttttggttactgtagccttgtagtatagtttgaagtcaggtagtgtgatgcctccagctttgttcttttggcttaggattgacttggcgatgcgggctctttgttttatgcaaataaactagaaaatctagaagaaatggatacattcctcgacacatacactctcccaagactaaaccaggaagaagttgaatctctgaatagaccaataacaggctctgaaattgtggcaataatcaatagtttaccaaccaaaaagagtccaggaccagatggattcacagccgaattctaccagaggtacaaggagcaactggtaccattccttctgaaactattccaatcaatagaaaaagagggaatcctccctaactcattttatgaggccagcgtcattctgataccaaagcctggcagagacacaaccaaaaaagagaattttagaccaatatccttgatgaacattgatgcaaaaatcctcaataaaatactggcaaaccgaatccagcagcacatcaaaaagcttatccaccatgatcaagtgggcttcatccctgggatgcaaggctggttcaatatacgcaaatcaataaatgtaatccagcatataaacagagccaaagacaaaaaccacatgattatctcaatagatgcagaaaaagcctttgacaaaattcaacaacccttcatgctaaaaactctcaataaattaggtattgatgggacgtatttcagaataataagagctatctatgacaaacccacagccaatatcatactgaatgggcaaaaactggaagcattccctttgaaaactggcacaagacagggatgccctctctcaccgctcctattcaacatagtgttggaagttctggccagggcaatcaggcaggagaaggaaataaagggtattcaattaggaaaagaggaagtcaaattgtccctgtttgcagacgacatgattgtttatctagaaaaccccattgtctcagcccaaaatctccttaagctgataagcaacttcagcaaagtctcaggatacaaaatcaatgtacaaaaatcacaagcattcttatacaccaacaacagacaaacagagagccaaatcatgagtgaactcccattcacaattgcttcaaagagaataaaatacctaggaatccaacttacaagggatgtgaaggacctcttcaaggataactacaaaccactgctcaaggaaataaaagaggacacaaacaaatggaagaacattccatgctcatgggtaggaagaatcaatatcgtgaaaatggccatactgcccaaggtaatttacagattcaatgccatccccatcaagctaccaatgactttcttcacagaattggaaaaaactactttaaaggagtgtatcttttgtgaccatcagagtctaatgcagaaacagcagtcgtgtaacactccatttcagctgggaatgcttgcattggtttgacactcacagcagtcattatcacctttacttttcccttcagatgggaccctatatttggaggccccatggagagagaaccccaggaacccttgctcgaccttcccagatggccaggttggggacctcctccagccaggtcacactccaggtgtttttctaaatgttgggatgaaatctcttagggtgtgttatcccaggatctgctcttgtcaaagctggtggattttcaacctggagcgagcagtcacagtaacttaaatgtggaaatctgtcagagcgtccatggggctgtggcgcgattggttttggcctcctgccatttcatttacgaggtacttgtatttgacaaacagacctcgtttatgcacagatatcagccttcttcctgcctgagcatcaggcacaagactgcgccctgacccgggtcccgcatctgtcacccccgtggagaggggccgtttctcccaaacacaagcctgttcttgttcgcctggtaaaggggttctgaagcgagggtgttgtggagtctttgagtgtcacacagaaaaatgtccccactcctgcagggcttcagtgcaaggtcactgtgggcagactcaggttctcagaggacccaggagaagtaggtagcgggcagtcccaagttcaactgtgctgcttgagggtatggcctgcaggaggagggttggggctagcttatggggtgacagaggcagccatctaggagaggggggcatggctgacatgctcagggcttcccagggtccctgaatttagaggtctcttcctcccttgccttctggtgcttggctcagggacacccccgtcctccacctgggaagcacgcggggctctccactagcctgggcatgggacgggagggctcattaaccatcctcccttcctccatcccggcctgtttatggattcctgactgagtccgccaggcggcttgaagcggttgtggacagctgggccgcttggcattttatggtgagtggcggcttcccaaggccgtaactgtgtatgcctgtgcgtgagcgcccagggacgtgccttcccccgccaggcccttctgaggggtgccctcgccgggggtgccaccaccctggctggcaagagcagggacagaagggtgggcaaagcaggcagggactgggcggccggcagaggctccatccagaggagaagccccctcatcccatcccaccctagactgatgctttcatcataatgacgcctcctggggagacaccttattgctcttcacagaaacaatctctactgagagaaattaattgttttgttgttgatgggaaaagaaatagaagcagctatttttaagtgttctctctagctgggggtgttggaatcgcaagtcacaggtggctgtctcaagaacccataccctgatagggtagtggaccccatggggtacagctgccctggagtgggtaccttctgcctgggattagttggggggctcctgatggcttgaggcgaggctgcctcattctgggcacacagctgggattaagtcccagctccgtcactaactgtgtgatccctgtacctctgtttcctgatggggacagtgatatgttttcttaccggatgttctgaaaattaaatgagataatatgtgctcagtgtttagctgggaacaaagtaggtgcccagcaactggctaacagtaggagctggatgcacgagaggttttagcagtgggttggcgccggacttttctgtgggtaaggtctaattggcccctgcccttccgtgacccttgctgtgctggtgctgtgcctattaacccaaccagggtgtgagccttgagtcggtcagtcttgaggctctgagcagcctccatacatcggttgtggagtgaggatccatcttcaccctttgatatgctctggccccaccttgagctcaatcagtgcgggtgaccctgagctccccgtcacaccaagcacggcaccaaacccacttctggagctgctccataaacagcgaccccccacacacaggcgcatcctaatgggggccccggcagcatatttactatttacggagcatctgggagataacaacttttatgggagggattttaattagtgctgtggctaaatgcggtggagttaacatgggtggaattggctggtgcgctgacttctgtgagaggcatctggcggagggacgtggccgtatttatcacctggtccctgccactaaagggggtgggagtggagatagtgctgagaatcccagggaagtcaaggccaccaccagggcagccagggcagccagggcggggcaggggctgggcagggcccgctctgtggccgggagctctgtgtcgtcacacagggccatgtacttggcttcatgctgtgctcttgtcattttgaaatgtttaataatttaatctttgagcttctgcttggtgagtgaggtccgatggggcaccggggcattgcaccagcaggggaggtgtgccacaccgtgccatcccctttgcaccatggtgacccatgagcaccacattctggcggactcaccgtgcacgggcattcagcgagactcgatgcgaaggcaaggcaagcacgtgacatccagtactacgtgaggtgctgacagcccccagggggccatgacttgcctttgtttatattttatttttaatttgtttaatttttaacttttgtgggtacatagtaggtgtatatatgtatggggtaatgagatgttctgatatagacatgcaatgtgaaatagcacaccatgaagaatggggtatccatccctcaaacatttatccgttgagttgcaagcaacaggatttccctttgaaacacagcttgcttcgaatgcagagggaaggcactggtaccctaagaaacacaagcaaccatagtaggtgtatatgtttatgaggtacacgagatgtttgggtacagacgtgcaatgtgaaatagcaaagcatgaagagtgtggtatccatccctcaagcatttatccgttgagttgcaaataacatgatttcactttgaaccagagcttacttcaaacacagagagaagacactggtaccctaagaaacacaagcgaccaggaaacccaaccatatccttcttgccagtgttatgtccctagagtagccgatcccttacactggaaatgatgctatgagaggaagagaaagatggggctccccacagtccttcttcctctcagcccttccttgcccatccacaaactgaaggtagagggtatgggcagagtgtgtgtgcctcaggaagtgaaataaaagcagttgtgttcattctgtgcagccctcccactgttctgaatgaaatacatatgaatgaatgagctagaaaaaagttgtgtaattttggtgattctgctatgagttaaacacttgtatatttgtatttaaaactggcatggcacaatataatgatgaacgtaaaactcatgctaataatgtagagtttttatttttctttattcagaatggcttcaaatagtaagttaaaaacaccatgacaagtctagagaaagactggaagaaaaaataatgctttatattttagcgcctttcccagcatttctcccttgctttttgaacaaggggttcttacttttttttttcttgagacagggtctcactctattacccaggctggagtgcaacggcgtgctctcagctcactgcaacctccatctcctggggttgagagattctcctccctcagccacctgagtagctgggactacaggtatgtgccaccatgcccagataattttttatatttttagtagacacagggttttgccatattgcccagactggtcttgaactcttgagctcatgcagtccacctgccttggcctcccaaagtgctaggattacaggtgtgagccactgcggcccggctggggttcctgcatttttgttcatggtggggtctcatctgtgatgcagctgtccctgggtgtgggactccaaggggctttggcttgaggagctgtgaaagtgtgaatcttgcagtggccaggtgggataggaggttggtagtagaataataatcgcagtcataatagctgtctctgtttgcatttcccgtgagtcaataatcgcagtcataatagctgcctctgtttgcatttcccgtgagtcaggcactgtcctaagcaagtcacatgggttatctcattccctcctgcaaaccccaccaggtactttgtttatgcgcccattggacagatgaatacattcaagtccagagaggttaagtagcacagccaaggaggttctcagagcccagctggagtccatagccagccagccttcttggccaccttgtttctctgccaccctcattttgctcattttaggggatggaaaactgaggctcagaagagcagcccaaaatcatgactcgacagggtaggggcaggcctggaactcagtctccagccctgtggccaccagggctgctcctccctaggccaccctgcctcacccatgctggaagcattttccttcttcctctgaaaaggcaggcgtgtcaccattcgtcacagtgggctccagtattcatgttagtaacccactgagtgactgtctgctccacattccttcttgagtgatggctcaggacctcagcatagctctctagactcccaacgcccaccacacaagggcgccagcattcagaaacacgtatacgcctggacagacgcacccatagctgctcctgcacacagacacacagaaaggcgcaggcacatatgcatacacacacttgtgcacagacaagcaaaaacaggcatgcacaatgacagtgctcggatgcgcagacatgcacagactcgtgtacacacacactcctcagacacacatgtgcaggcctgcacacagacctgtgcacatggatatttatgggcacatgccaagggtacacaggctcacacacgagctttcacacacacatgtgcacacaggcggtcggacatgcccacgtggacacaccacagaattgactcaaggccacttcaacattgccagaagtcccagcaactcagtctcacagaactggaaccatgggtgttggcttgtggggtcaaggggctaagggggtcatcacctaaggtttgttggcacctcttccacatgtccttgcagggatccctgtgctggagggattgaggtaggagagagggaagcatggcagaaaatgatcttggggtcatgtggaaccccaagtaagggtggccaatttgtgggcaaatgtttgttctgtatttaagatacatgtgggcttagaaatcacaaagtgataagtgcctgtgctgcgtgccagctttgtcatccacagtcccctaagaagctccccactgggtggaaggggacacacagttgcaaaatgctggcaggcatgacgtcaccagaaatgcgggtcagaatggagagaatgtggggccagaaggggtcagggaaggcttcctggagggggagggcttggtcagagcacaacaaggctcaccgatgctgttctgggcttttcctttctctacctcccttcataataaccagctcacttggagccaatacacacagggaactcgttatgacaacctctgaggccgtccagggcctttactcctcccactaccctcctctccctgcccaccacctgtaggtaggtctcatttcacctctgtcatccagatttagaaactgaggctaagaacgtctccagtctgaggtctcaggtgggagaaggagtggcaggaccccaatccaggaccatctgctttccaggcctgcctctcagccacctcagttttcccaccgtgtggttggaggcgttgcttgggcccccacctagagaaatgggcgcagagctggctctgcatttgaaaggagtcccaaggccctgccccacacgcgctagctgtgccaccttgacgtgtgggtcctgtgtctggtctcagagccctcgtctgtaaaatgggtgtgagaaatggataaaatgaagcaggcaacgtgccttgcacagggactggcccaggatgcgtgtctagtaagtgtcagtgccaccatcactattgctgtgatcgatcgcctgtcactgctggctcgtccggggttaggacataatcggaaaatgagaattccaagtcggatcaggaggagtggaaggaggaggctgtgactgtgagcccagtgagcacctgattgcaggggtcagattagggcagaggctcactgtgatcctgttggcctcccaaggtcagcctcgcccctatggtgccaggcccattctttcctgctccccgtttccacagctctctaggtgtaacccagccctggctcggagcgacatgggctgtcactgtgtgaccttctgcatgtctcccatcctctctgaataccaggtttgtcctctgtgcaatgagaataacgtccaccttgaggtggtttctggagttcagatgaaagaaagcgtggcagggctttgaaaagggctacactgtatacccctgctatgcaggaggacacggggtgctgaggagggaagtggttatggcgcccctccctgtccctgctcctccccggggtccctgcccctccacatctcaggagagctcagatgctttgccagccccgggagggtggcattctgcacccagtagtttccatggtgaaaatcccagttcctgccattttgcaacccatctgacctaatttatactttatcatttttggcaattttgtgacttgggttggggagtgggcggtgttgagagcactggctctgagtcatcctcattctcctccggctgaaattcaagtcatgatctaccacatgcacacacgtgtgcacatgggcaggcagggaggccgggaggggaaagtggagaagccccaccatggcaggcatttgtttttctttcaatctttatattcttgctgaatatacgtgtggagagagttgtgaatttttatctctgacctttgtaggcacaaaatcatcccattatcatatacctgtcagaagacaggagagaatcagaccgtattctttgccttttatgtatcaaaaaaagaaagagaaagttattagcgtttttccaatccagggattcaaaaaaaccagctacttctcggccaagctccctgaagcagaggttgctctctgctggcctcgtcacctgctcctggcccagcccagccaagcagcaggactcacagctctggcccatcccctatctctgggcttcctcagagagggtgtcctacagtggtcagcatgcccgcgtggggacaggagcagcttctctgaacacatgtccccagtttctcaatgcccctgcagagatggaaccttccaggtgaaagctctctttcccctcagagtgatactaagtagcaatttaaaaacaccatgacaagcccagagaaagagcagaaggcaggagaattctttagtttttattttttagagacagggtctcgccctgtcacccaggctagggtgcagtagcgtgatcacagctcactgcagcctcaaattcctgggctcaagtgatcctcccacttcagcctcccatgtagctgggaccacaggaaatgtgcagccatgcccagctaatttttgtattttttgtagagatgcggtcttgctatgttgcccaggctagtctcgaactcctgggctcaagcgatcctccagccttggcctcccaaagtggtgggattaccagtgtgagccactggacccagctaggaaaatacttatttcagtggctttaatggcatttctcccttgctttttgaacaaggggtcccacgttttcattcttcattgagtctcatctgtgatgcagctgtccctgagtgtgggatcccagtgggctttggctcagggatttgtgaaagtgtggctcttgcaatgggcacgtgggataggagggtggtaatagaataatgatcacagtcataatagctgcctctgttcttgtttcccatgagccaggcactgtcctaagcaagtcatgtgggttatctcatttacaaacctcaccaggcaggttcctttatatgcccatttgacagacgaatacatttacttccagagtggttaaatagcatggctgagaagcagctgagccagtattcagggcctggaatctcaaatttctcatccgtcaagtggacataaaaatgatatttgcttgggaggccgacgtgggtggatcacttgaggtcaggagtttgagaccagcctggccaacacagtgaaacctcgtctctactaaaaatacaaaaaaattagctgggcgtggtggcagccacctgtagtcccagcttctcaggtggctgaggcaggagaatcgcttgaacctgggaggcggaggttgcagtgagccaagattgtgccactgcactccagcctgggtgacagagcaagactccttctcaaaaacaaaaaacaaacaaacaaaaaaacaaaaaatgatattcattttacagaagtgctatgaaaaagggctgaaatatgtttgcacagtgtcaggtacatggttagtgctcagggcgtgtcatcatcgccaacaccctcattattatcactggaatcattactgcggctgctactctggcagcccattcattccttcaggccacacgaaaggagagtgtgctaggtgccaggccctgtcacggcactgaggacagagcaggaacacagcacaagccctccttgtacaggtctgtttgtacaggtctgtctgtgctcgccagggatttacttcagccctggtacatgcccccagctaacgcttccaccttacagagggaagagaaatgttcctgcaagcatccttccagtgcctgccaggcattctcccagcaactctgccttgatccccaaatcccagtccattgctgatcggcctcagactctgtcctgcttggtggggcctctggctgtggtctgccctaggtggcctgggctatccccgggtgggctggggaaggccagaggggactgctgagatgatggacatgttctttgcagagcacgcagcatcagggtctgaatctggagaacctgggagctgggactggcctttagcacactcagacttggcaggtggatagagcaagaggagaaggttctgggaacccagtaaaggctgggggtgaggtagaactctcacctccagaggcacctcctcagaaggtctggggtggccacagtaagtcctgccccctctcatgctgcctgcatctcccctcaatgggatcctgtctttcctgcctcccccataagcatccccagccctgaagtccctgaggcctgcaggctggcacatctctgctcacccaccccagcccaagccctgagacaggactctgcagagccttcatgtggggcagcaatcagcctcatctctgacggatgtactttagcctggaagcctctatgcatcctgtttcacagacaagcatctaacctcaaaaaaggcagggatttgggtgatgctgacgataaagtctaattttacctcaataatgcaagtggctctgtaattccatataattatattaactggaaaagcgaggcccgccttcgatagacaggactcgattatctttgcaggcatggagtatgctctttaattccctttgcccgggaaggtctgccttgcagctttaaatccaaataacgacagcatgctgttggcattcctacgaccacttatttgttgaagcttttacataaataaaaaggggtgctaaattgggagggcatgcccttaaaggtgaagtctacaggtctcagagctgctgcagacgacgggggctgaaggagctgcgggatgtccggggagtttccctaagctgggctttttcatcatctgcctgacattttaactctccttccttctcctctcagttcctctgaaccgtagagcccacatgcaaatacaacagataatgggcggcttgggtaatttagggtgaacagtaagtaaataatgagaaacttgcattttgtaacatctgtcatctttcttaagtttcatttattttacgcctcccccccaattaaaaaaaaaagacccccataaataccgcagcgcctttggtttagagatggtttgaatggggagaacagctcgaatgcactgttttttcctccaagtaaggtactataaaactgtttataaaatgaaactaatgagatttggagcacactgttacctgatattaagctgttttgatgagtgaggcaaattgctgtggttaacaaatgtaaaaccatcacttttattgatacaggtttgtgtatgtgtgaaattaatcaaagcgtgggcgatgatgaacagtttctgtagaattctgtcaaaggttaagagctagttatttttaagaatgacatgaatctagcagagacagtgattgcctaaatgaccattgtaattaccaattacttcttgaagcagagaatatattcacggcgtgcagtcctctaaatacagaaaggcattagcccatttacgtactaatgcacataatttagctcctgaaaagggcagatgggagcacaatgaaagatataatagataccgcctaatatcattccctaagaatattggattcatcaaagatgaatattactttatgtcagattgttttttataaaccagtcaaaatatatttcatctcatttttgcacgcggtatcagggtgacaatagcaacatcacctttgtcatcaaaatctggccagctgtgggactaggcagacagggtgcctgatggggggcgtttcagccaccctttgtaagccggtgtgtaactcacaggcaggataacttccaggcaggggtgattaattttatttcctttggagtcgatgtcagtggaagcaagagagacacaggttctcagacaggaggatgggagcagggaggtctgagtcgacctcctttcggaaaatgcatcatctgaaatgtcttccggaaggcgacctcctccccagccctgggttcctctcctcaggtgttgaaaatccaatatccaggtatatggagaaggaggagggagccctttctgtctgcacactgatcttaatgccatatttggattgatataatgatagcagagatcttgtttcccaatgttgcagaatcaatgtaataacagtaacagaaatattatttagttagtgcagttctgctggcataatgtagtcacgctttcagcaaaatgatggaaaatataaacatttaatcagcccttattcacaaaaaagcctaaaaattaatcatgtttaaattctgtgtcttcgggaagcaattcagatgctaagcaattcagattttttttaatttttatttttcttgccttttttttttttttggatgcgcagtcacagataacctagtgctgctctcaattacagtctccttgggagaggctgaactgcctggcgcctgccaagagatggtgactccaagctgtggatttggtctgcgcccctccgagtgggtttccagcatgcgtctgattctctccttcatgtcaccaatcaagggcaggaggttacacaataccctgttaaaacagccagccacctgctccccgtcctgctgagccaggcagtggggcacgcgggtgtcacagagaacgtcagcgccgcctgaatacctactacgcgccgggccctgtgccaagcgaggactcggccctcctctcaatgtttccccaaggtcatgaccaggattgcttcgtcttgagtcctgagtccctcagaacatatgggggttagaaggagaaaggagagaaaaggaggagcatcagagagggaggatgaaagcggggagaaaagagaaagaggggagaagagtggagtaccagatccaaggtcaagcttcagggccaggtgaccttgagaatcacttcccctttcctggctaggattcctgtaacatgttaactggggatggtgattcctgccaaatggcccacgctggggctgggagaggccccagggagccagtgcaggcaactgggcttcacatgaaacccctgcatggcaggcccctccttctgctctgggcccagctcataacgttctcctttgaggggattgtgtgcctgcccagcaaaaacgggagcttccgtttcattctctgcttgtactgtgtggccttccctgtggggtgttttcttttggtcttctccttagaccagtggttcccaggcaactggggccaactttacacttccatcctctgggacatttggcaatgtctggagacacgtttagttgtcataagtggcaggtgctcctggcatgcagtgggtagaggccaggaatgctgaacatctggcttaaaatgtcggcggtactggagctgagaaatgctcatctggttatgatggcatggccagcaggtgccaggactgtgccctgactttgctcatcattcgtcccccagcacccagcacacctccacctggtacacagcagtcagggaataaataacagttgaatgaatgagggaatggggttcagagggtgctggcagggctcctattgggtgagaagtcggtctcctgcctgccttgagactccctggaagggacctggacctgctggtctctcttgagccaagcccatctctctgttcccagccacataatgggctcctaacattcagtgggctcccagcaccccagcagcctcaacttgctggaggatggccgcagtgctctagacctggacttggcctggcccggaggacacctgcagcctgggcaggaacacctacccatccaggtgccctgggatgcttgttctgcaggtaatgtccggattaggctcggacctttggacagaccactttcagttggtggtggacaccttcccctggtggacgctggccgcttggcaatggaaggagaaatgcgaatactttccctgtggcccaacctgggcagcctgtcccaggaaggatgctagagaggctctctatacctgtccaagactttcccagcgaccctactcccttgtgtagagcaatggaagcctacttgggggacaggagtacccttgttttcagaccctgcaggtccccgagaagggtctgtgtcatccttaagctgaagctggacccatttctggcccatcactctgtctagtgagacctgagaccgatggacacagcagggccagggtctcctgaggtagagtgtatgttgggggagagccagggggaggaagggtgagtgggagatcactgctgtggtttgaatatgtcccctccaaaattcacatgttggaaactcaatctccaatgcaacagtgtggggaggtggggccttttggtaggtgtttatgtcaggagggctctgcccttctgaatggattaatgccattataaaagggtttaggccaggtgcagtggctcatgcctgtaatcccagcactttgggaggccaaggtgggtggatcacgtgaggtcaggagtttgagatcagcctgaccaacatggcaaaaccccgtctctaccaaaaatacaaaattaaccagccatggtggtgagcacctataatcccagctacttggggggctgaggcaggagaattgcttgaacccaggaggtagaggttgcagtgagccgagattgcgccactgcactccagcctgggcaacaagatggaactccatgtcaaaaaaaaaaagtgtttggtggagagaatctgggaatctggcctctttttgcccttctgccttcaccacgtgaggacatagtggtcctctccactggaggagacagtgttcaatgtcccatcgtggcagcagaaagcagccctcagcagataccaaacctgtggatgccttggacttcccagcctcaagaacagtgagaagtaaatctctgttctttataaatcacccagtctcagagacttgatgacagcagcatgaacagactaacacagtcatgttactggtgcttcaggctcttggggaggggagtctgggtaggcctgacagaggagtggggggacatggggaatggggggcagcaggggtaaggcccatagactccattgggtgtttctctttatggccttgtccccactcctctcatcaccgaggatccctggacacccaccaggagcttccctcttccctggggtccaggcagcagctcccagcatgggcagtgtttcctggacagatgccacttttttttttttttttttgagagggagtctctgtctaggctggagtgcagtagcacaatattggcacactgcaacctctgcctcctgggttcaagcgattctcccgccggccagttttgcatgtctaggggccccttgcagagaagggcaggggcagcacagggaaccctagactggggcctgaagatgaggccttgagtctgtcatctcccttcatgcactgaacagtgcagccacccagggcacggctcttggccgtgatttggggagcgtgacaagacaagggcgtcaggacttggccacctggaagggctttgcttttggatatgcagggaattccctggggcagggcagaatgctacccctcagctctccctcatgggagaccctggcaatcccgagggagaaggcgctcagcacctaatttacttcctctaactgccctgaaggcctagagcaacagttaagaatcacattaccgccttttattgtctctaatttttacccaaatgatttctgctgcaccagcttaaacaggctctcatttcccttcctgctgctgtcatgctctgggtgtgtgcatttctgaaggggtcagcctctgaatgctcttctccctcaatgcaagatgggccttctgtcctcctctcccctccctgggtgggagtaggggcaccagggcaccagggcttactcctgggagggagccctgtgtctatccagcaactgtttgtgcatgtgtgtggggggaccctggaaagtctgcagggtgtgtctgcccatgcgccccctccctcctctgaacctcagccctctgccctggatctgagtctagggaagccagacctatcaagctgtgtgacagtgccctttaaccagactcctttggtggtaagtgacagaaacccagctgaaactgaatgcagaaaaaaggccgggtgcggtggcatatgcctgtaatcccagcactttgggaggctgaggcaggcagatcacctgaggtcaggagatggagaccagcctggccaacatggtgaaaccccatctctgctaaaaaaaatacaaaagttagccaggcttggtggcggatgcctgtaatcccagctacatgggaggctgaggcaggagaatcgcttgaacccgagaggcagaggttgcagtgagccaagatggcacctgggcaacaagagtgaagctccatctcagaaaaaaaggcggggggttgcaggtactcttttagtactcatggagctgagcctgggaatagactttgcaccatgcacgggtggatcagagatatctcgggaatccctctcccccacttttcagctctgctgtgctgggcacagacttgcctcctaggcagcaaagacagtgcagccagggatgccccttagttgagcaggaaacctgcttcccacagggcccaagaatgatcctgacatctcattggtcaggctctggtcacaggcccaccactgagtcaattgctgtgctggggacgatgcctggggtaaatagtcagggctgggccatgttcctctcctggtagcccatggagtgtagatgggtttgggcttaaccaacccacatggaaaggagcaacttcctaatgggacacctaggagctgtgaccacagttaggaacagatctctgctgctaaccttggaggtcccttccctctttcctgcctcagcctccatctctatgtccagggctgggtgagagaattggctctgcaagtgaaaccatccccacatggttgacaagaattacaagccaggttctgggcagaaatataattaagcatcagtcaggctgccctctggcacacttcattgttgctaaaattcatgtagcactagatactgaccatttatttgcacgcctattgttcccatagatgggatttcagacattagaatcatacagcttttgtctaaggattctgtaagatgtgtttcccacctcgaactccagcaccagtttgaagaccccacggaggatggggatcagcctgagaacccagctccttcctctccctgccccaggacttcaccctgcatgcttccactcatcaacaatctccatactacacccattccaaaacccttacaatctccagccccaaactccttggggaaacggattggaggtttcctctcacctccttattctgtaacccgatgattagttctctctttctgctgcaacctggtgtctcggcgtgctcacttgctgtgagcagcgggctgtggccatcatggttacacgggagcacctggaagatgctgttgctactcttgttgtcttattttgtccctgggcagatgtggacaggagaacgctggtgggagtgtcaggcatgtcctccggctttctccccgcctgcagcatctccctccccaggagcactggccaaagcctgccacttccatcaccacactgtctagagagttcccagcccatgtccttgtaggactttctcagagccccactgaatggcaggaaagtttttatttccccaagaccctggaggtgtcggggcctcagaggttctgtgtgggaagagagaggacttttctgctgtaaaagccagaccaggcagctgcatggtgctcctgcctcatggacattcaaataccttcttggaccctcgtgcttttcagaaaaaatgaaagagcttgaggactggaaagctgggaagctggaaagacagagagcccatgcccatcatttctaagtgaggaagcagaggcccagagaggttgaggactttaccagagccgctcagcagtgacagagtctgcatctgcccagtggccagtgcagagctgggactggagcccaggtttctctccttgggggtctctgaaagactcccaaggcaggctcggcttttccaccctctttcctcctccattgctcaagtctcctggtgtaaacttggtctgcttccttccaatgctcacccatgttcttattcctaatgcctgcactgtcactgccttggcggggacatggagactcagtgacacacccttaggctggggctggagagagcagcccccctgaaggctcctgccccacaccagcctctgtgtccttgcaggccagtatggtcagaaaaacccagtcctggaatcactgtcttcagaaccacagggaccagggaggcagccgtcccccgggaccactagctgcaggcctggaggcatcctgctcatgtgagttggagagagctcaccccagccctgccaagcccctcttcttttgaaagaagccaaagtgagcggtgataaccatcagttaattatcgaaggaattctatgcttcataaattgttttctttctgagaggaaaaggaaagtctactgaaaatgggattttagggtgtgtttcaggcgaataggatgatgtgggccttcttctctaattcttatccagtgcagtgttcaccaggctcccactttcacaggtcaccatggcaatgggaggacatggagcagggcatccctggaaagtgggtttctgagcccatgtgctcattgccaggcccctgcagggcgagccccatcagctgtcttcctgcttctccttctggttcatcattcttactactcatgagcaccgactctgagcctggcactggactggtgctttccagaccgtgctgccctgagaattgagtgtgacatcatgaacgcctgttcacaggttaggaagctgaaactccaagattctacagcatttgtccaagcttccccagggagtcaatggccctggtcgcctggctccctggctcttgcccttaagttctgtgccttgctaggcaagaacatccaccttttatagaccaggactccggccttccagtgctatcagcacacccaggacaaacatggggctccttccctctttcccttgcgtgtcttgttggattaagatttatttttaacccagagcaaatctggggagctggccaccctgtcagatgccattggctggatgcttctctttttgcaagagaaatggctgactgaggacctgcagccagacctgggacatgttgtccaggacctggacttcatgttaatggcatcttctgaaatgacagagcagcatcattactcccagtcctattctaaaaatggacccatctctaggtcaacatcctcagcacagttcccacccacttgctgatattgtcaagtgcattggctagggttgtataaggcaagggagtcagaaggagttctttctccttctctccctccttcccttcctttcttccttcatttctttaatattatgcttgtgacaacaaaattaaaatttttttgtgtcacatttttcaattgctatccattcatccatccatccttccctctgtcaattcatccatccatccattcatccacacatctattcatccattcatccatccatccatccatccatccatccatccatccatccgtcaatttgttcatccatcaatccatccatccatccatccatccgtcaatttatccatccatccatccatccgtcaatttgtcatccatccatccagccagccatctgtcaatttgtccatccgtccatccatccatccatccagacatccattcatttacccatccatttatccacccacctatccatccatccgtcaatttgtctatccatctacccatctgtcaatttgtccattcacccattcatttatccacccacccacccatccattcatctgtcagttcactcccatacattgtctgtcagtccatccatccatccatccatccatccatccatccatccacccatcaattcacccatccatctgtcaatttgtccatccacccatacacccatccattcatccacccacccacccacccacccatccattcatctgtcaattcatccctcatatattgtctgtcagtccatccatccatccatccatccatccttccttccttacttacattttttttttctttactggatgtttatttacatcactgctccctgtgggcaaaaattactcaatccgttgagtctgtgtttagttgccttgaccccagccctaatttcctgttcacttttatatgtcacttctttggctggatggacagacccagtgggtcatgaattgcccctctgcaaggcatccttctcatatgcagtgatgacatagctcttcctctcctgagtcacggtaggtgaatgcctccaggctatcattctctggatacatgtggctctttgatcttgagcaaatttacaggcccctaaaagaactggtttgtctgaggagaacaaccaaggacagaaaattgagtctcatccttgagtcaaaatgcagacttcctattgaaatacaaatccatcgtttcaaaaggtcagctgggatggtacttaaaaaaagaattgcagctggttgcgaatagggcactggaaacaaaaacgtcccatccaagaatactctttggccctgtgcccacagcttcttgtgattgtggcttggccgcattatcattctctttcagttcctgtcactcagacttgcaagcctggagagagaaggccagccagatagatggacaggcgatgtgcaggcaggtggcctctctacctaagtatacgttctcagggtgtgggcatctcagcatagagccagctgcccttcaccagccccattcacattcccatgtccccgggcccactcagccttaccttggaacatattctatttcttagaggccaagctttggccagaaatgagtgtcccttacctcctccacaccatgtttcacttccaacgaacctacaggcctgaacaaaggtcctatctacttccccaagggcacacttgacattatcccacattcccatcccttccaacactcaactgagccttcagcttttggctctgtccctgaaatagtttggatatttatcatctccaagtctcatgttgaaatatgatccccagtattggagacggggcctaaggggaggtgtttgggtcatgggggcagatccctcattgatggtttgatgctatcctcatggtaacaagcaagctgttactctgttagttcacacgagatttggtcgctaatgagccaggcacctcctcctctctcttgcttcttttctcaccatatgatgtgcctacccatcatttgccttcacccatgactggaagctccctgaggcctcaccagaggctgatgccagctctatgcttctggtacagtctgcagaactgtaagccaaataaacctcttttctttacaaattaccccagcttagggattcctttatagcaacgcaaaatggtctcacacaatctgcatggccttctgagactcacccagtgcctgggcctgcccagctaaggttggaggaggggggagacagagaagttaccaagtgagctcatttgcttatttactgctccacacccaccttgttcccaaagcatttaatgcagatgacaaaaatacatacagcacaatagtatgaaaatagaaaagagatcaaggcaaagggataaaggcaaaggagtgaacggtgaaccaaggccagggataaagtcaaactatagaaacttacgctttagaagtgggggtggggggtgaagggggttccttcaataaattccatatataaatttctgaattttctttacaataggaagagctgactccctgcaaacatacactgttttgctttagggaaggattttgtcaaaggtgtgtttaaagggagtctccttaagtgcatttgaaggaagatatggtttataacaactccatttacacagaactttgtcaacagcggtcagtggatagccctgtctgtggatccctcgtggctgtccctgggcagactgtaccacctggacagcagctgttcccctcaccggcattgctaagcaagtcagtgagttgacatgatggagcactttccaggtgtcctcgcccaagggaggtggcaggaggacagggacacagaagattggagcacgtgcccaggagctgagtgagtggtgctgactttgagctcaggcatcctcagtaccggaagaacaaggtgaaccactgcactatttaagaggggaaattgtatagtgcctggccatcacgacacggatcaatgggacatgaccactccctggtggcctgcatttgggacccacctcctttggggcctggctggcctcatgggttggtcagcctgtggccaggaggcgctcactgccacttattgaatcacatgggttgaatctgctctcgcggagctctgggtccccacgggcagtccctgaccccaggcaggggacagagggtacccagcaggatgctgcccctgccttacatggaagccatgcatctggcctgttccccacattctgtgtaacaggaattctacttggatccaggaaggaaaataaaagtgttttttgttttttgtttttttttttttttgagacggagttttgctcttgttgcccaggctggagtgcagtggcatggatcttgactcattgcaacctccatctcatgggctcaagcaattctacttcctcagcctcccgaatagctgggattacaggcgcctgccaccacccctggctaatttttgtatttttagtagagatgaggtttcaccatgttggtcaggctggtcttgaactcctgacctcaagttatccgcctccctcggcctcccaaaatgctaggattacaggcgtgagccaccacgtctggcccaaaagatgtgcatttctgttttctcacggaaatactgtttaatggatctcttcctatgccctcctgtctccttgcctctctgttcctccccatcacctctctctcttcctctttctttctatctcagggtgatttcaaaaatcccagaatatgtcaagaagcctttaacaaggggagagagaattaagccaaattaattacagcaaaataagtggaattaggcttaatttaagtaggtaacagaaaagaacggagctggtcttttccccttcttggaaggagtcctttaagggtttttttttttcttttttttcccaaatggaagggtaacatggctgcttggctcagagcagcgtgctctcctcctccggtttgccctgttctcctggactgggattaccggcttgcaagtcgctgaccgtggttgaattttatcattattaaggttcagtgctaacctcctccccttatttccttcccatttaaagtttgggggataataaattcttttgatttagcaattatgggagcacagaattagtcaaacgcgggctttgagaacaaagtagaatggggacccggtgggcttttgccgagaagccacaaatactcacaggcttgccatggaaagatctgggggaaatggtgctttgttaagtctgaaattggatgggttttaatttaagagcatagctccaaccctcacctctctctctaagcagaaaaatagttatgtttgtgggtgacatattcctgaagtcaattgcgctaaaccactgtgctgaaatacattatattgacttgtctggggctgtgctttttcgagtacaacattgagttggctagtaataaaaataaataagaattatatatcatttcattcattgttttggtattacagatgcaaaatgcgcaaagatataacacaacatgttgcaatacacttttagaaaatacaatgataaaattaatccttgatacggaatgatgtgtgtgcatgggttaaggcggaaggcagagagaagcagtgggtgcttggaaggtgcagccaggtcaggtactggactgacatccgtgttctgggtgggtgggtggaggccagaaggggcttgtagtgccccccactgacaaggagaagggaccctgcctgcagctgatgtgtggggcgaccgctgccctctctgggcaggctggagcctgcctggaccccttccatcgatgatacttggtcagcttgaggcctggtcccccgggctgggccctgttaggaagagagatagctagagtgtccctgcccactgcagggtggggttggagccaagtagaacaagcatttgtttgctgttggtttcctttgtctatgaagcagccctgagctggaacggttacagtggggtgtagacaaatggggaccctagtcccgggatcctcaggttcactgaaagtccctcagtaaacacactggaccgttcacccgccagtctctgggctcagacctgctgggggtgggaagcacccactggcctggagaacttcagggtggaggtccaagggggaggccctaaccccaaccccgacctttaggtaatccagtctcttagtctgacagcgtggggcagggagagcccccagaccaatcccatcactgggctctggattctccccgtcaccctccccagcatctgccatcccagacgcatgtgcgcacacgtgtggatgcaggcacagatgaaggcatacacacacatgagcacccaggagaatgcacacatatgaacatatacacgtggacatacacacacatgagcacccaggagaatgcacacatatgaacatatacacgtggacatacacacacatgagcacccaggagaatgcacacatatgaacatatacacgtggacatacacactcatgcatgtagagacatgaagctgaattctcatgtgtgcacacacgcacacatacacacatgcggagacacctacacacagaagacctgtccatcccattcttaaggcttctctgaggtgggacaaccttccccttccccaccaccgcaataagggtcccagtgctgtctcctcccctgccctgcaccctcctccctggacccagccccaaccccagcttctcggcagccccagctacccctggcatctctggtgccctctctccctcacaggcagcatgacctctgacttagcaccccagtggctccccactgctctgggcatgaaacctcatcttcacctccccaccacagcccagtgtggccctggccttccaaccctcttccctacacgccccctgctcccggctcatcaccacaccagcgtggggctctgtcccatcctcatgaaggcccatgatccctgcagagctcagctgagcgctgcccccaccaagccccctgctgtacctcactggtcccctccgccgtaaagctctcccacagcggcagctaccaaccctccttacagtagcctgcgtgattattccattacatctgactctccctccagactctcagctccatgaaggcaggggcctgtctgtttgctgtctgccgtgtctccagccacaccagggttcaatacctttgctgggtagaggcgtcagtaatctcactgcagagggatgcagtctcccagagtctctccccctaccccagccccctcctatgaggacctgggagagtcttgcttttcatagcagaggctgctgagcccctgggcagtcacctgggatgagaactgtgacctgggatgagaaccctggtgtcctgactcctggctggcctcggagactctcccactccacccctagctgggcttgccggcagcctctgagggtcttcctgaatgactagaaggatgtcccctgcaccctcccgcagcagacaccagaccctgctgtcagcgaagggaaggaaggcaggcctagaagccagcatgtgagtgtcatcgttgtagggaagggatgtgctgccacatggagaccctgccactcactgcccttcctgctcagagggaggagggagctgagatagatgtgaagcaatggagtctggaacctggggacctaggggccatggggacagggacagtggggaacagagccatcagctgcccttaacaaagtctgtggtgggcaggggtagaggccctttctgccactctcccaccccagggcccagcagacagagagcctgactggttcctctctgtgcatattcggcggcagaggtggggaaaaggtgggaggggaaccctaacctggaggaagcagagtgtctcgggctggcggtgggcccgggagaggcacgggaggctgagcaatgaggaggccctttcctttcacatggcccatcagctgattgtcccctggctccctctgccatggcccagggtggctacctctgctgcaggcagccatggaagcttctcagaggctgcctgctgggtgctggcctggaccccttccattgaggctcctcagctggctggaaccctggcctcctgcaggctggaccctgttgggaagagagatggccagagtgtccctggccactgggcaccagcaggggcaaaggatcccagtttgagccaggcaggacaaacgtttgtgtgtggttggctcaggcgggctccacccccaaaccctgctgcatggcagggcatgcatcttctcggtgaccttggtgacctcaggatggggacagtgcctggaggtctctcacccaaaccaggctgcaggcactatggcttctccaccctgtctagcctggaggtgtttgcacgggcagagccttgagcttcccaggctcatccttcagaaacctccccagacctggtcccgatctgcccacaccttcctagctcacagtacagcccagcatggagcatcccgcttgacaataatgtgtttattgggtgattacttgacaagactgtgggcttttcaagaacagtcttctctgatttggtcagcttagcacccagcttggcttgccacatgtgctcattaaaaaccactgattccattaatgattatgagaagaatgtgcacacgtgcttaagtgtagtgtgtgcatgactgtgagagcgtgtgatcgagtgcacacatacatgaatgtgtgagcacgtgtgcacatttgtgtgcagttgtgcatatgggtatatgtgtgtgcacatgtgagtgtgcggactcagcacgtgtgtgtctgtgtgagtgtgtgggtatagcatgtgtgtgcactgtgattgtgcatgcgtgtgcatggatgttatggactgaattgtgtgtccctgccctagttcccagtgttctggtattaggaggtggggccttttgggggtgattaggctgagatgagctcatgagggtagagccccaggatgggattagtgcccttatacaaagaggaagagacaccagagctctctgtctgacccccaccccccatatgaggactcactaggaaggcagccgtccacaagccgggacctcaccagacactgcatctgcagcaccacgggcttggccttccagccttcagaacctcgagaaataaatgtctgttaagaccccccagtctgtggttcttcactctagcagccctggctgactatgaaagtgggtacagtgtgtatgtgtgtgtgtgcatgtaggtgtgagtgtgagtgaatgtgtgtacatgagtgaatgtgtgtaggtgtgagtgtgagtaaattcatgtgtttgtgtgtaggtgtgtgagtgatgtgcgtgtgtgtaggtgtgtgagtgaatgagtgtgtgtaggtatgtgtgaatgtgtgtgtatgtacgtgtgaatgtgagtgaatgtatgcatgtgagtgtaggtgagtgaatgtgcaagtgtgtgtaggtgtgagtaggtgcgtgagtgaatgcatgtatgtgtaggtgtgaatgagtgaatgtgtgtgtaggtgtgtgagtgtgtgtggtgtgtgagtgaacatgtgtataggtaggtgtgtgagtgaacgcatgtgtgtaggtgtgagtgaatatgtgtaggtgtatgagtggatgtgtgtctgagtaaatgtgtgtgtatgtctaggtgtgagtgtgtgtaggtgtgagtatgaatgtgtgtagatgtgtgaatgaatgcgtgtgtgtaggtgagtgtgagtgaatatgtgtgtgggtgtgagtgaatgcgtgtgtatgtgtaagtgtgaatgtgtgtaggtgtgagtgagtgtgtgtgtagtgaatgtgtgtgtacatgtgagtttgagtggatgtgtgtaggtatgtgagtgaatgcatgtgtaggtgtctgtgagtgaatgtgtaggtctgagtgtatgtgtgtgtgtgtaagtgtgaatgtgtgtaggtgtcagtgagtgaatgtgtatgtgtgtggtgaatgtgtgtgtacatgcgagtgagtggatgtgtgtaggtgtgtgaatgcatgtgtgtatttgtaggtgtgagtgaatgtgtaggtgtgagtgtgcatgaatgtatgtatatgtaggtgtgagttaatatgtgcataggtgtatgtaggtgtgtgtgtgtaggtgtgagtgtaagtgaatgcgtgtgagtgtgtgttcagagtgttcccagataccagatgttgaggagggacctccctagggcagtggctctgagttctccgaatccaggtctccctccagagtcccctggggtctctgagcaccgccctgagcaggttttcaggccagtgaggctcactgattttccattctcagaactgtctgaaatccacgaccagcaactctttgccctgggctgccactggttccacatcaccatgttcccccagtcccctactgtgacacccagtggctgctcctgcgggtggagcctgtggtgtccaggagagtctgggagctgtggggccactgcagtcttttacacagagtccctggggagacagctgtgcttctacttaacagcctctgctgaaggcccacgggtgccaggcactgggctagtttctgagagggagccatcccagcctgcctttggggtatccctgacagagatttgaaggggcctctgggaggtaggaggggatattcccagccatggctagaagctgggagggcctgagtgcgttggggagcaaaaaatcaggtgccctgttcacacccctgcagtctctaagtacagggcgtggggtgcctctgccagagtggacccaagggagcacctctgccactttgccacagagccctggccctcaggctgctggaaggggccaatgcattggcgacaggatgtgggtggcagtgcctgggagaggtgaagctgccctgtggaggggctggagcaggagaagggagctggtgacattaagcagtagccacgacaggtgggagtgagctggagggcttctgagacaggctggtggctcccagagacacactgtgcgcaggtggggggcatgcggtaggtgggagccctgcattcccaggagtgtatatgtggccactggacatgaccttaccaaaacagggagatgggggaaactgggcttcaaggggacaagctaggccagtctttaaggagctcatggggctgtgtaggaggggtgctgacaagatctgacagcagctgttcccagtcaaggtagacactgctatgtgccacacagggcatgcagacagggcactgcaagggttgaagggagtagggagggtgaaatgtgctctcttggtctgtggcaggtgccgtgcaaacttcctgctgtgtgttcccttgtcctgtgtcacctacatccttgatgtctgcggtgaatggccagtgacagtgttaatggatttcctaacatgatcccctgaccaacgcggctgtagggcagacacacctctcaggcacagagcgaagcccccattgcagggtggtctggggcactctgtaggggcaagcgggatcctggtcgtttattgctttggctgttacaaggctctttctggaaggccacatctgttctcggatgttcacccagcagcccaaacagacaggtcagatcccagccctgcaatgtgacttattcaggaacctttaaagtggctttgaaagtcatttggtgccagatgtaccaaatgtcttggatgggctagagggctggggctgtgaggtgagaacttacctggcattgggactgccaggtacatccccaaagccacgcccctccagaaggcatctgttgagtttcatatgccccaggaggactctatatttaaggccaggcaggaggacaccctgagaaaccacgctgtcacgactcagtctctcagaatgccatggcagtttaaaaaaagtacacatacactttttgccacatcttagatgtccctccgcctacagaagccatcaaataaaaattaattttgcttcaaaaaaaaaacatgctgaatatttttgacactcaatgtctgttcatttgcatgggacacgttcttccataatgaatcatcgtaacgcttaaattaaacacagtaaaagaatggttaatgccataacacgctgacaatttaacctggccaatatttttattgccttgtacaagaaacctaacagagcaccacttgcttttgactggtggaaaatcggttatgaaccgccagggagcggccaatttttcaaatgcagtcattcagtcatacgatagccactatgactttttttttcccatacactattgctattataatcttttgagggtatttttatcacggcaataacctcctcaaaatcagtctttacagcagttaatgattggacagctggagctataactggccttggcattgcccccagctattagctaacaaaccagttgttatctgcaggtaacagccaatttcttgtggaatttttttgataaagtgcctcctggatcgaaggtattttttccctctttgtcccagcttcaagcatcttggggagcttggtgaagagatggaaagctggtggctctgtaacccccaggcatggagcgggatctctgagggttgctgtattgccacaggagagtggggactggcttttgtcgctgcctggctttgtgaagtgcagggtgagagtctggagaaagaggctgctctgctgaactggctggacagagaagggagctgactgccttggaggcgcagagaatggaccaggcagggccaggccttgagcgaccctgggagttggggtgaaagccaaacaatggggtcaattccattgttgagactcatttggtgccagatgtaccaaagatcttgggcaggctagatggctggggctgtgaggtgagaacttacctggcactgagacagccaggtgcatccccaaagccacgcccctccagaaggcatctgttgagtttcacatgccccaggaggactctatatttaaggctcggcaggaggacactctgagaaaccacaagagaaatctactgagtggacaggcaccttgcgtttgataaatctctgtgtttagatttcgatatcctggtttcatgtgtgtttcatttttgatcacccttctaaaatgtgagcttttaaattcgtgacttaaagttaggaaatgttcatctattttaaagtgaacacctttttttataaggaccagattagtaaatttggaccttggcactgatggctaagctacgttcaagcacaggatccttgttgggatgaaattctccaggttaacccaagtaaaattcagagcgggaatgttgagatagaatgctggaccaagagaagctaactggtaaagggacagcctgccttctgcgcccgcaaggccttctgcttttcatgctgcctggagagaggagccgcttcccttttcagccgtgactgtgttttaatatccctggtactaagtgtcagaagtggattgggtgctgcagcactagagcgaagagttaacatgacagcgatcacctgtttgtggcagcagtttgagattctgcagattgatcagtgtttactgtgtgagacccagagattcgattcctgaaatcacagggctgattgcagtaactttacatatgcgtccttaacaagcagggcaaaataaaaaaattaatattcttaaaagtgaaataagatatttccagcctggagagaagaccaattaaaatcacttcacatttttaaatgagttttcatttgagagagtggaattctttgaagaatatgagttttgctaaatatttgaaatcatcatatatcgtgcttatttgaagcccaggttgcttataaattcaatgacaaattgagaagtaagcacagaatttatgtttgaattatctgttgggtgactcccctgctggggcaggccccggtttcttaaatttggagggtcactctgggtaagctggaaggtaaactaggcttcctgcgaattcccaaattcaaatactgccatgggactaaagcaattccatgattttaaatcattttgaatttcataaacccaactctttaaccttttgtaaatgacaagaagtgcaacccattcttaacatttctgatcattccacacgatgctggccccataaagctcatcttttccaaatttaagcacttaaaaatgtgaagtgctccaataaatttaaattggcatatgctacgcatatcaatgggaaatgattcaagcattagaggctggaagtggtgagtgagggcaagcacgccagagcatccattgtcacaggattgatttttaatgactttctattgatttgatgccttttaaacctgaaggccgaaggttggtcctgcatatctatcacgctgtatctttggccgatgcactctcccgaggtgaatgtaggttgctttcaccctcttgccaagacagtgtcctatgaggatgcaggtccttcggggataggtcctggcttgcatagagccttccagggacaagaagtgaacagccacctggcagaagtgcagcccagtcttcaaggctctagtggttgtaagcaacaacatccatttcaagccaaaaagggatgcaccagctttcataactgcaaaggcctagggtgagtcagggatggctgggtgcagacactttctccttcccctttttttgtctctctctcacttcattttctctctagttctcttgcttccttttttgctgcacctctcctccatttctgcttctcagttgggaaaccttcaggcaaggctctgtgcgctttgtagcctcgggcagttccaggctcctattctcatgctcccaagtttatcagaaagaaatcctatctcaacaatgtaaaccaaaaatacaattctaaggcctcccaaccatctgaatggacccctcctctcagccaagggcactccaaagttaacctaaaaactagttcaaaccatgatgggaagggggagccagacatgcctcatgataccctcctccctttgggaattactgacagacagactctttaaagtctgataagaaacattcacaatctattctctctggagcctgatacctggagacatcatctgcatgataaaacctcaggctctacaccttatcataacccacacatttctttctattgataataactttttcaacgaattgccaatcagaaaatctttgaatccacgtatgacttggaagctctctgcttccagttatctctacattctggacccaaccaatgtacattttacatacattgactgatgctttatgtctccttaaaatgcataaaaccaagttgtggcttgaccaccttgggtgcatgttctcaggatctcctgagggatgtgtcacaggccattggtcactcatatttggctcacaatacatctcttcaaatattttacaaagtttgactgtttgttgacaacaatatcaaaagagggtgtgaatcgtgggtcactggaccatcttgggtcatgtgcccagttctaagccagttgccatggtcagggggatccaatgttctgattggccccattctcactcctagagctaggagtggaataaaatcccaaacactggaacttggagtgagagagagataagtatgagtcctatatggggcatggaggtcccttctgactccagatgtttctgattctctgttgtgagtaaaattgcttctgcttgtttccttgcaattgttacaggaaaggggtcctgatctagaccccaggagagcattcttggatttcactcaagaaataattcaggacaaatctgtagagtaaagtgaaagcaagtttattaagaaagcaaaggaataaagaatggctactccatagacagagcagccctgagggtagctggttgcccactgttatggttatttcttgatgatatgctgaacaagggtggattattcatgcctcccctttttagaccatagagggtaacttcctgagctggtgggactgtagcagtgaggacaaccagaggccatcttggatttgaggggatttggcctgcttctttactgcaacctgttttatcagcaaagcctttatgacctgtatcttgtgctgagctcctatctcatcccgtgacatagaatgccataattatctgggaatgcagcccagtaggtttcagcctcattttatccagcccctattcaagatggagttactctggttcacaacctctgatacaattagctgtgctgtgtgatttgccatggccagtgaccagggaaaccaagtgtgtcacttcttggtggaaaccttaagaattccaggcagtggatgttcttgcagcctgggacctgagtagagaggcccaggagtggagcccttggctagccaacccatgattaacatgaacaatggaagcaaacattggttattagaaaccacagatatttgaggattgttcatagacacaacataacctagcctattctgtgtgatgtggacatcagtatcagaaatgaggtcttaccaaaacccaaacctaaaatgtatggcattgactttgtgttgggttagtgaacagtgaagaaatttaccagaggctggaaagatggcaaactatgtgatgatgtagtaaaacatttggcaaaactgtcatgtgcagtaattcaggagacaaaatggaaacttgcagttcttggggagagtttcggggatggaatgttcatggcgtgtggtggtggttgttggctgcctttggcaaagtatcagaagaaaaagatgaatttaaaaataattttctgatttgtaagcaggaataaaagagaatactcagggagtactacggttggaagctgcaactccttctcatctcctaacagcaaaagctagaattgagaaacactttcaatgacaaagtccttaaagaaatatgaaatcatgaacattgctttcatacccattgttaaagtctctgaatggatgaaagtgtttcaggcaaatactcattacaggatgtggagccccttgaatactttcagttggacaaaatcctgagggaaaaggaggttaagatgagatcctcttcccaaagcttgataggttcaaggcatatattataaagcttaaggagagatgtggagaattggaaaaaatatccctcccccctgcatattaggaaaagaaatggacaatgcacaagtgcacaccctctgttgaacctatcagaaagctgaggcctcaggacaacactaaccccaaatctggagagtgacaggggtctttgggggaagcagggggcgtggcacttgcttagctgagggcagaagtcatcagacactggtaggaaggattcagctagagtagtggatgcatgagtgaaggctgagaacaggctggtgaaacgatgtgaagcccatggagctgcagaaatgaaggcaggtgggtagcctcttgcaagcttcttctcaaaccccaccaggcactcacagggaagacagggaaggatcttgagaaagtttcctttgtgcaggccttgggaagggaaaaaataaccaccacaggagaggcagaaaactctactcagactattctcttctatctctcctagggagcaaaagccttaatttgcaggacaaaggccatcaaagactgttgttgcacttagcgcattaagaaagcccattgcagctgggataagagagcagaaaaaaatacgctagccctggggaagtggtaggaaaaagtactggattcagaacctataactacagcccataaaaccaacaattgctctagttacaactagagggatttgaagcctctggtgcctagagggtaaatatagtaacaacaaacctcagaggcagtctaactcctaacaagattagtataaaactccacattaaagacccagaaaaaaaaaagttatgcccatttctgagcttataaggctttaatggaaaagatgcacagcatacaaaatcagatgggtaatttcagaagaaagatggaaactataagaagaatcaaatggaaagggttgaaataaaaacagaaacaaatattgataattgaattagagctccccagagcgacaaaaccactaggagattatagacgtagatatagatatagatatatgagggagatttattacagtgtgttatcattcttgcattgctataaagaaatacctgagactgtgtaattgatgaagaaaagaggtttaattggctcatggttctgcaggatttacaggaagcatggtgctggcatcagctcagcttctgaggaagcctcaggaagcttacaatcatggcagaaggtgaagggagagcaggcatgtcacatggccagagcaggagcaagagagagtaggggatggaagcgccacacacttttaaataaccagatctcatgtgaactcagagcaagagctcacttgtcaccaaaaggatggctgaagccattcatgtgagatccaccccaatgatcccaaatacctctcaccatgccccacctccaacattgggaattacaattcaacatgagatgtgggtggggacaaatatcaaaactatgttataagggaattggctcacacaattatggaggctgagaagttccatgacaggctgtctgtgagttgtagagcctaggatgccagtagcatggcttcagaaccaggatagctgatggtgtaactctcagcctgaggtaaacggcacgagagcaacgagcctggaattgtccaaagacaggagaggaagagtatatgtcagctccagcagacagatcaacatatttgcctcttccctatttttgttctctccaggcccccagcaaattggatgatgcgcacctacattgagggtggctctaccccacctagctcactcagactcaaatgctaatttccttgggaaacgccttcacagacatacccaaaaataatgctttactaggtttctaggtattttttatacttcagactaagaaacctaatcaagttgacacctaaaattaactatcaaaatgcctttgacaggctcatcaataaaattaacagctgagtgagcagcaggcttgacagctaagtgaatttgaagataggtcaaaagaaattgcctaactgaagcacaaagaaaataaaatttacataacaaatacacaaaaaagacaatagtgcatccaagagttgtggggcaatatcaaataatatatcacatgcattattggaattctagaaggaaaagagaaaaaatagggcagaaaaatgatttgaagaaataatggccaagaattttctaaaattaatgacagacacaaaactccagatccaaaatgcttagacaataccaaggaggataaatagacctaccctcaaaaaacaaaattaaaaaacatgtaggcatgtcaaattccatctgttaaaaacagaaaacaaataaatcctgaaggcagccagagagggaaaaaaagaccatattcaatacgaaataacaaaggcacttgttttcagaatccatgcaaggcagaagacaatggagtgatatctttaaagtactgaaagaaaaaagaattgcctaccttaaatgctatacccaatgaaaacaggtttcaaaatgtaggaggcataagaagttctccatgaaaaaaaaattaaagaatttatcacttgaagatgtgctctataagaaaagtaaaaggaagttcttcaggcaaaatgaagacagtctcagacaaaaacttggaagagtaacgtaaataaaataaatgaaagtaaaataacttttattttattttttaattactctaaaagacaactgcctgaagcaaaaaataagtagtaattatttgtatatttatacctatgtaaaatatatggtaataacacatagaatgggagggaataattggaggtgtactgttggaaggtctttacactacatgtaaaacatgtataatattacatgtaaaatactacctgtaaaatatactacatgtataatattacatgtaaaatactacaagtaaaacagtataatattacttggagacaggctctgattaattaaaaatatattttataaaccttatgacaactactaatgaaataataagaggcataaataatcagtccatggtggagataaaatggaatcaaaacaatatttaagtaattcaaatgatgggagacaaaagaaataaaaacagaagaaattaattgaaaaaagctgctaagatagattttaatcaaaatacaatttggatcaataaccacactaaataggtatgtctaaatacattaatcaaaaggcagagacttccaggttggataaaaaagcagtatgctatctacaatatactatgtacaagaaactcacaatatgctatctataatatacctgtacaagaaactatacagagctacattaaaagtaaaaggataaaaaaagatataccatgtgcacactggtttcatttctcttgagtatatatctaggagtagaatttctgggtcatattgtaactctatctataactgttgggagaactgccagactgtttttccaaagtggttgtaccattgtacattcccatcagcagtgtttgagggttctgatttatccacatcctcatcaacacttgtttatatttgactttgattacaaccattttattagtccattctcatagtacagaataggaaagcaataggaaaaaaatcaatgaaaccaaaatctagtgcttcaaaaagataaacaaaattgataaacctttaactatattgataaaaagaagattaaaattattagaatcagaaatgaaaaagggaacattactactgactttacagaaatcaaaagatttataaaaaactcctatgaacaattgtataccaataaattagataacttacataaaatgaacaatttctagaaagacacaaagtgattgtggtctacaaagaccaaaatggactcaagaataaataggcaatctgaacaaatagagatggaatgaataattaaaatattatataaaaagaaaatcccaggccagatagcttcactgctgaattctaccaaatctttaaatagaagaattaatactttttgtttactttggagagatcatcacaaacttcaaaaaaatagaagagaaggggacactgccaaactcattctgtgaggccagtattaccctgatacaaaaaccagacaaagacaccacaagaaaagcactgatcccttatgaatacaaatgcaaaagtcctcaacaaaatattagcaaatcaaatccagcaacatgtaaaaagactttaccatgagcaagtaagattcatcccaggaatgcaaggttggtttaatatcccaaaatcaattaatgtaatgtaccatattaatagaataaaaagggaaaaccacattattttcttaatagataccaaaaaaaatttctaccaaatccaacaccttacattaaaaaatactcaacaaactttaaatggaaggagcttcctcaacctcaaacccatagctatcatactcaatggtgaaacactgatactttttgtctaaaataaggagtgcaaaacaaggatatccactcacaccacttctattcaacctggcattagaagttctacacaagacaattagtcaatgaaaccaaataaaaggcatccagatggaaaagaaaaaagtaaaactacctgtagtcatagaagacatgatcttgtgcatagaaaattctaaggaatccactaaaaactactagaactaacaagtctagcaagagtgtagggtacaagatcaatatacagaaattaattgcattcctatactctagtgatgaagaattagaaagagaaattaagtaaacaattccatttacagtagcatcaaaaggaataaagttagaatagacaataaaataaatgaaaaacttttactctgaaaactacaaagtattgttgaaaggaattttaaaagatctaaataaatggaaaacatcccatttcggtggattgcaagaccaaatattaagatgacagtactcccccaaataaatctcattgttgaatagagtgttctatagatgtgtattattctataggccaagtgataaattatgtaaataatgttttacacagttgctttttaaacctcttaagagaagaaaagagaagagtatacatttatactgcattctgtaattatatgatcacttttactagtattgttttttcttgtggatgcttttaacctgaacaacttcccgccttaggacttgttgtaaggtaggcctgttagcagcaaattctctctgcttttgtttatctgggaatacatttatgtcacctttagttttggaagatagctttgctggatacagaattcttggttgacaggtttctttttttttttcttcatgcagttttagcactgtgttctggccttttttgtttctgttaaaaagtcagctcttaaacttactggggtttccttgtaagtgatgagtcatttttctcttggtgctttcaatatttcctccttctctttcacttttagcagtttttttttacgtgatgtgtctggatttctttgtgttaattccacctacttggagttcattaaattttctagatgggtagattaattttcaatgaatttgggacatcttcaaccattatttccttgaatattgttttctgcttctttgtctctcctctatgtccagtactccaattacatgtatgttggtgtgcataatggtctctcaccaacttctcagaagctctgttcatctttaaaattcttttttctctatgttcttcagattgtataatctccattgatctgtcttcaagttcgttaattattttttctgccagttcaaatctattgtggagctcctctagtgtatttttcattgcagttattgtgctttttaatttcagaattttcacttggttattttcaaataatttctatttctttatgaatagcccatatttaatatgacattataatatatttctctttacttctttagtcatggtttctttcagttctttgaacatatttataatggctattttgaagttttttttttattatactttaagttctagggtacatgtgcataatgtgcagctttgttagatatgtatacatgcgccatgttggtgtgctgcacccattaactcgccatttacattaggtttatctcctaatgctatcccttccccctccccccaccccatgacaggccctggtgtgtgatgttccccaccctgtgtccaaatgttctcattgttcagttcccacctatgagtgagaacatgtggtgtttggttttctgtccttgcgatagtttgctcagaatgatggtttccagcttcatccatgtccctacaaaggacctgaactcatccttctttatggctgcatagtattccatggtgtatatgtgccacattttcttaatccagtctatcattgatggaaatttgggttggttccaagtctttgctattatgaatagtgccgcagtaaacatacgtgttcatgtgtctttatagcagcatgatttatagtcctttgggtatatgtccagtaatgggatggctgggtcaaatggtatttctagttctagatccttgaggaatcgccacactgtcttccacaatagttgaactagtttacggtccctccaacagtgtaaaagcatttctatttctccacatcctctccagcacctgttgtttcctgacttttgaatgatcgccattctaactggtgtgagatggtatctcattgtggttttgatttgcatttctctgatggccagtgatgatgaatattttttcatgtgtcttttggctgcataaatgtcttcttttgagaaatgtctgttcgtatccttcacccactttctgatggggttgtttgttttcttgtaaattcgtttgagttcattgtagattctggatattagccctttgtcagatgagtagattgcaaaaattttctcccattctgtagtgtgcctgttgactctgatggtagtttcttttgctgtgcagaagttctttagtttaattagatcccatttgtcaattttggcttttgttgccattgcttttggtgttttagtcatgaagtccttgcccatgcctgtggcctgattggtattgcctaggttttcttctagggtttttatggttttaggtctaacatttacttttttaatccatcttgaattaatttttgtataaggtgtaaggaagggatccagtttcagctttctacatatggctagccagttttcccagaaccatttattaaatagggaatcctttccccattgcttgtttttatcagatttgtcaaagatcagatggttgtagatgtgtggtataatttttgagggctctattctgttccattggtctatatctctgttttggtaccagtaccatgctgttttggttactgtagccttgtagtatagtttgaagtcacgtagtgtgatgcctccagctttgttctttttgcttaggatagtcttggcaatgcaggctcttttttggtcccatatgaactttaaagtagtttttttccaattctgtgaagaaagtcattggtagctggatggggatggcattgaatctataagttaccttgggcaatatggccattttcacaatattgattcttcctatccatgagcatggaatgttcttccatttgtttgtgtcctcttttatttcgttgagctgtggtttgtagttctccttgaagaggtccttcacatcccttgtaagttggattcctaggtattttattctctttgaagcaattgcgaatgggagttcactcgtgatttggctctctgtttgtctgttattggtgtataagaatgcttgtgatttttgcacatgggttttgtatcctgagactttgctgaagttgcttatcagcttaaggagatttggggctaagatgatggggttttctaaatatacaatcatgtcatctgcaaacagggacaatttgacttcctctttttctaattgaatattcttcatttctttctcctgcctgattgccctggccagaacttccaacactacattgaataggagtggtgggagagggcatccctgtcttgtgccagttttcaaagggaatgctcccagtttttgcccattcagtatgatattggctgtgggtttgccataaatatctcttattattttgagatatgtcacatcaatacctagtttattgagagtttttagcatgaatggctgttgaattttgttgaaggccttttctgcatctattgagatagtcatgtggtttttgtcattggttctgtttatatgatggattacatttattgatttgcatatgttgaaccagtctttcatcccagggatgaagctaacttgatcatggtggataagctttttgatgtgctgctggattcagtttgccagtattttattgaggatttttgcattgatgttcatcagggatattggtctaaaattctcttttttttgttgtgtctctgccaggctttggtatcaggatgatgttggcctcataaaatgaattagggaggattccctctttttctattgattggaatgctttcagaaggaatggtaccagctcctctttgtacctgtggtagaattcagctgtgaatctgtctggtcctggactttttttggttggtaggctattaattattgcctcaatttcagaacctgttatcagcctattcagggattcaacttcttcctagtttagtcttagaagggtgtatatgtccaggaatttatgcatttcttccagattttctagtttatttgcgtagaggtgtttatagtattctctgatggtagtttgtatttctgtgggattggtggtgatattccctttatcattctttattgcatctatttgattcttctttcttttattctttattagtcttgctagcagactatcaacgtgatgatcttttcaaaaaaccagctcctggattcactgattttttgaagggtttttgtgtctctgtctccttcagttctgctctgatcttagttatttcttgtcttctgctagcttttgaatgtgtttactcttgcttctctagttcttttaattgtgatgttagggtgtcagttttagatcattcctgctttctcttgtgggcatttagtgctataaatttccctctacacactgctttaaatgtgtcccagagattctggtatgttgtgtctttgttctcattggtttcaaagaacatctttatttctgccttcatttctttatgtacccagtagtcgttcaggagcaggttgttcagttccatgtagttaagcggttttgggtgagtttcttaatcctgaattctagtttgattgcactgtggtctgagggacagtttgttataatttcttgtcttttacatttgctgaggagtgctttacttccaactatgtggtcaattttggaataagtgtgatgtagtgctgagaagaatgtacattctgttgatttggggtggagagttctgtagatgtctattcggtccacttggtgtagagctgagttcaattcctggatatccttgttaactttctgtcttattgatctgtctaatgttgacagtggggtgttaaagtctcccattattattgtgtgggagtctaagtctctttgtaggtctctaaggacttgctttatgaatctggatgctcctttattgggtgcatatatatttaggatagttagctcttcttgctgaattggtccatttaccattatgtaatggccttctttgtctcttttgatctttgctggtttaaagtctgttttatcagagactaggattgcaacccctgcttttttttgttttccatttacttggtagatcttcctccatccctttattttgagcctgtgtgtgtctctgcacatgagatgggtctcctgaatacagcacactgatgggtcttgactctttatccaattttccagtctgtgtcttttaattggagcatttagcccatttacatttaaggttaatattgttatgtgtgaatttgatcctgtcattatgatgttagctggttattttgctcgttagttgatgcagtttcttcctagcatcgatggtctttacaatttggcatgtttttgcagtaactggtaccagttattcctttccatgtttagtgcttccttcaggagctcttgtaaggcaggcctggtggtgacaaaatctctcagcatttgtttgtctgtaaaggattttatttctccttcacttatgaagcttaatttggctggatgtgaaattctgggttgaaaattattttctttaagaatgttgaatattggcccccactctcttctggcttgtagagtttctgccaagagatccacttttagcctggtgggcttccctttgtgggtgacctgacctttctctctggctgcccttaacattttttccttcatttcaactttggtgaatctgacaattatgtgtcttggagttgctcttctcgaggagtatctttgtggtgttctctgtatttcctgaacttgaatgttggcctgccttgctaggttgtggaagttctcctggataatatcctgaagagtgttttccaacttggttccattctccctgtcactttcaggtacaccaatcagacgtagatttggtcttttcacatagtcctgtatttcttagaggctttgttcatttctctttactcttttttctctaaccttctcttctcacttcatttcattcatttgatcttcaatctctgataccctttcttccacttgatcaaattggctactgaagcttgtgcttgtgtcacgtagttcttgtaccatggttttcagctccatcaggtcctttaaggacttctctacactgtttattctagtcagccattcatctaatcttttctcaaggtttttagcttctttgcaatgggtttgaacatccttctttagctcagagaagtttgttattaccaatcatctgaagccttctactctcaacttgttaaagtcattctccatccagctttgttccattgctggcgaggagctgtgatcccttgaaggagacgaggtgctctgatttttagaattttcagcttttctgctcttgtttctccacatctttgtggttttatctacctttggtctttgatgatggtgacgtacagatggggttttggtgtggatgtccttcctgtttgttagttttccttctaacagtcaggaccctcagctgcaggtctgttggagtttgctggagatccactccagacctgtttgcctggttatcaccagcggaggctgcagaacagcaaatattgcagaacggcagatgttgctgcctgatccttcctctggaagcttcgtttctgaggggcacccagctgtatgaggtgtcagttagtccatactgggaagtatctcccagttaggctactcaggggtcagggacccacttgaggaggcagtctgtccattcttagatctcaaactctgtgctgggagaaccactactctcttcaaagctgtcagaaagggatgtttaagtctgcagaagtttctgctgccttctgttcagctatgccctgcccccagagatgaagtctacagaggcaggcaggcctccttgagctgtggtgggttccacccagttcgagcttcctggacactttgtttacctactcaagcctcagcaatagtggacgtccctcccctagcctcgctgctgccttgcagtttgatctcagactgctgtgctagcagtgagtgaggctcccaggaatgggatataatctcctggtgtgctgtttgctaaggccattggaaaagtgcagtattagggtgggagtgcccaattttccagatactgtctgtcatggcttccctttgctaggaaagggaattacctgactccttgcacttcccaggtgaggcaatgccctgccctgctccgtgggctgcacccactgtctgacgagccccagtgagatgaacccagtacctcagttggaaatgcagaaatcacccatcttctgtgtcactcatgctgggagctgcagactggagctcttcctgttcagccaccttggaaccaaagccttgaagtctttttgtgataaatttgacatctggtcatttgtttttattatactttaagttttagggtacatgtgcacaacgtgcaggttagttacatatgtatacatgtgccatgtttgtgtgctgcacccattagctcatcatttaacattaggtatatttcctaatgctatccctcccccctccccccaccccacaacaggccccagtgtgtgatgttccccttcctgtgtccatgtgttcccattgttcaattcccacctatgagtgagaacatgtggtgtttggttttctgtccttgccatagtttgctcagaatgatggtttccagcttcatccatgtccctacaaaggacctgaactcatcattttttatggctgcatagtattccatggtgtatatgagccacattttcttaattcagtctatcattgttggacatttgggttggttccaagtctttgctattgtgaatagtgcctcaataaacatacatgtgcatgtgtctttatagcagtgtgttttataatcctttgggtatatacccagtaatgggatggctgggtcaaatggtatttctagttctagatctctgaggaattgccacactgacttccacaatggttgaactagtttatggtcccaccaacagtgtaaaagcattcctatttctccacatcctctccagcacctgttgtttcctgacttttgaatgatcaccattctaactggtgtgagatggtatctcattgtggttttgatttgcatttctcttatggtcagttatgatgagcattttttcatgtgtcttttggctgcataaatgtcttcttttgagaagtgtctgtttgtatcctttgcccactttttgatggggttgttggtttttttcttgtaaattcgtttgagttcattgtagattctggatattagccctttgtcagatgagtagattgcaaaaattttctcccattctgtagtttgcctgttcattctgatggtagtttcttttgctgtgcagaagttctttagtttaattagatcccatttgtcaattttggcttttgttgccattgcttttggtgttttagacatgaagtccttgcccatgcctatgtcctgaatggtattgtctaggttttcttctagggtttttatgcttttaggtctaacatgtaagtctttaatccatcttgaattaatttttgtataaggcgtaaggaagggatccagtttcagctttctacatatggctagccagttttcccagcaccatttattagatagggaatcctttccccatttcttgtttttgtcaggttcgtcaaagatcagatagttgtagatatgtggcattatttctgagggctctgttctgttccattggtctatatctctgttttggtaccagtaccatgctgttttggttactgtagccttgtagtatagtttgaagtcaggtagcgtgatgcctccagctttgttcttttggcttaggattgacttggcaatgcaggctcttttttggtcccatatgaactttaaggtagttctttccaattctgtgaagaaagtcattggtagcttgatggggatggcattgaatctataaattaccttgggcagcatggccattttcatgatattgattcttcctacccatgagcataaaatgttcttccatttgtttgtatcctcttttatttcattgagcagtggtttgtagttctccttgaagaggtccttcacatcccttgtaagttggattcttaggtattttattctctttgaagcaattgcgaatgggagttcactcatgatctggctctctgtttgtctgttattggtgtataagaatgcttgtgatttttgcacattgattttgtatcctgagactttgctgaaattgcctatcagcttaaggagattttgggctgagatgatggggttttctagatatacagtcatgtcatctgcaaacagagacaatttgacttcctcttttcctaattgaatatcctttatttctttctcctgcctgattgccctggccagaacttccaacactatgttgaataggagtggtgagagacggcattccagtcttgtgccagttttcaaagggaatgcttccactttttgcccattcagtatgatattggttgtgggtttgtcatagatagctcttattattttgagatactttccatctgaagaaaatagagacacaaaaaacccttcaaaaaatcaatgaatccaggaggtggtttttggaaaagatcaacaaaattgatagaccactagcaagactaataaagaagaaaagagagaagaatcaaatagatacaataaaaaatgataaagcggatatcaccaccgatcccacagaagtacatactaccatcagagaatactataaacacctctacgcaaataaactagaaaatctagaagaaatggataaattcctggacacatacaccctcccaagactaaaccaggaagaagctgaatctctgaatagatcaataacaagctctgaaattgatgcaataattaatagcttaccaaccaaaaaaagtccaggaccagatggattcacagccgaattctaccagaggtacaaggaggagctgttaccatcctttctgaaactattccaatcaatagaaaaagagggaatcttccctaactcattttatgaggccagcatcatcctgataccaaagcctggcagaaacacaacaaaaaaagagaattttagaccaatatctctgatgaacatcgatgcaaaaatcctcaataaaatactggcaaaccgaacccagcagcacatcaaaaagcttatccaccatgatcaagttggcttcatccttgtgatgcaaggctggttcaacatatgcaaatcaataaacataatccatcatataaacagaaccaatgacaaaaaccatgattatctcactagatgcagaaaaggcctttgacaaaattcaacaacccttcatgctaaagacatctggtcattctcacaagcagtttctgttactcgttttttgttctggtgtatgtgttatacttttatgtttgctttgcaagttttaattttttgtaaactggacattttaagtaatatattgtagcaactctgcagattgatctttccccctttggggattttaaattattttcttgtttatttttttgatgactggctggattgttttaatgaagtctattgtctcccacctcccccagtatgaagcttctgatgtcactccttgggggctagggggaagccttggatatgactatagtcaccctgggttgatagtggctttggaaggactcactttgactgtgtcttccccagccaccccagcagacaatcaccactaatttccagctcattacttcttcattgtttttttaaaatttctttgaacataggtgggagtaaactgatccaataaatttggagtccctttgaagggatagttattgaggtcaatgtgtgagatttgttctgaccctaggaggtcctctcacttgtctttctccctgactctttctagcaaactaactggcctgtagtttagcatatatctccagtgattctgccaatctcctttcaattgccttttaccacaacttgcattgtttttgagcggtgtccttaggcttgaagtccataccatgttacaaatgatgtgtttctttgaaaaaagattcagagctcttttttatgtcttgctgcttcccctaggcaaaaatctgtcatccatggctctgaagctgagagttgaaacaatggtacacttctctctgcaggagagaagtttggtttgcctctcctggcttggatttgtgaactacaaatgagccagggtgagggtaatctaaaccgcagtattcccagcacatcacacttgcggtagagcttccaacccatgagtggggagtgggaagaggcagggacaacatccaacttctcagctgcactcacctggaagggagccttacaacagctagctgaaggcaaaatgagagatgctgatgtcctgtccatcccaagaagacagttttctgactgggggctggggaagatgcacacatctacagtggagtttccattttgctgagctgagaggaagaagggtgagagcagttggttcaaattccagagactcttgctgttgttactgaattttagtagattttcttgagtaactgatttttcatctgttgtatgctcttaatatcatttccagaagtgttaaatgattggatagtttttacgattttcatcagtttcaaaggggaatgagaatacagtttcttatgctatcatgacaaagtgtaactcaaagaaggatactttcttaaaagagcagctacaaaatttctacagttgacatcatacttaatggtgaaaaactgaatgctttctctctaacatgaggcataaggaggatgtaatctctcacagttcttattcaatctcataatggaagccagtgcaataaggcaagaaaaataaataaaaggcatatagactgaaaaggaagaaacagaacacctgtatttgtatacaatacaattacgtatatagaaaatcccagataatttacaaaaaaagcttctagcacaaataattgaatttagcaaggctgtagaatacaagctcaatatataaaaaccaaatatatttctttataccagcaatgtagaattgaaattcaaaatttaaaacagattaatcacagtacaaaacataaaatacttaggtgtaaatctaacaaaatatgtataggatctgtatgctgaaaaatataaaacactggggaagaaataaaagaagacctaaataagtggagagatatccattatcacaaattagaagattcagtattgttaagatgttaatcctccataaattgatctagagattaactccaaccctatttaaaatcccagcttttaaaaatagatattaacaagttgttcctaaaatttatatggaaaggcaaggaaactagaagagccaaaacaattgtgaaaaggacaaatctggaggactcacactacctgatttcaagacttactatagagctacagtaatcaagacaactatggataaaataatagtcaatggaacaatggaattgaatagagtccagaaatagacctacaaaatgtctttgacaaagatacaaaagaaattcaatggagaaggaataatcttttcaagaaattgtgtttgattggactttcctatgcaaagaagtgaaccttgatccaaacattacatttcatagaaaacaaacaaacaaacaaaaaacaaacaaacctgaaaatgaattacagatataaatgtaaaatgtgaaactataaaacttctataagaaaacatgggacaatatcttcaagactgtgaattaggcgaagttttagatatgacactaaaatcaggatccgtaaaaaaaaaaatcggactttattaacattaaaaactgttgctctggaatagtcacgttaagagaataaaaacaagacaaacattgggataaaatatctgcaaatcacatttatgacaaagaatttatgtcctatatacataagtaacttttaaagttcaacaagacactaaataacccagtttttacaatgagaaaaagatctaaatagataccttgccaaagaagatatacagatagcaaataggcagatgaaaagattcccaatgtccattagtcattaggaaagtacaaattaaaattataacaagatatcactataatcctattagaatggctaaaattaaaaaaatctgacaatactaagtgttgacaaggatgtagagtgactttaactctaatgtactgttcttgggactggtaaatattacaatcattgtggaagacagtttggaagtttcttatacagtttactataaccagcaatcccactcttactaaataaaatcttatgttcacatgaaaacctgtatgcaaattttaatagcaactttattcataacagccccaaactgaaaacaacacagatgtccttcaaccaaggaagaaataaacaaactggggtgcttccttgcaatggcataccactcagtaatgtaaaggagcaaactatctgtattagtcagggctctctagagggacagaactaataggatagataggtaaagggaagtttattaaggagtattgactcacacaatcacaaagtgaggtcccacaataggctgactgcaagctgaggcactaggaagccagtccgagtaccaaagctgaagaaattggagtctgatgtttgaaggcaggaagcatgcagcatgggagaaagatgtaggctgggagactcagccagtctagtcttttcatgttcttctgcctgcttttattctagctgtgctggcagctgattatgttgtgcccacccagattaagggtggatctgcctttcccagtccactgactcaaatgttaatctcctttggcaacactctcacagacacacccagggccaatacttacagccttcaatccaatcaagttaacactcaatattaactactgatacactactgatacacacagaaacatagatgactattacatacattgtgctaagtgaaagaagacagaatcaaaagatttcatatttgatgacaccatttatatgacattttgaaaagggcagaacaatagggatggagtcaggagtaggagttggaggaaaagatggattacaaagggtctgcatgaggaaattttggggtagtgggatgtatcatgactgtggtggtgaatacccgatgagttattttgtcaaaactcgtagagctcatcatggagtttaagttaaaaagcaaaaacaggatgtgggggagacaaaaaatgaaatgcaaactgcggtaaatgaacctaactgtactacagatgaatgacataagcacactaaaaaagtgggaaagaaaaaaaactgaacctaagttaccttgtaaaatattcaatgtttcactagataatgtaaagataaagagaaaaagaattgcacatgaatgcggtattctggttagtaaatttgtttctcatgggagtgcaagtttgcaattccgtaactacattatgtgtatagaaaagttgaacagataagtaagtgtattttagataatacaggccagatttctcactgttggaaaaagaaattataattaaggaaaggagaaggctagaatgaaccctgcattgatgaattggaatgagaggtatcagtatgaatttacttaaaaacaacaaacacatgggtggatggatggatggatgggtagatggatagatagacagacagatacagacataaatacaagtatgtgtatatgcatggagaagaatacattatatatttataagttctgtttgctgaggtggcctagaagcaatgacaccctagtgacaatgggtacacctaatgctctaaatttggtttctaagtatcattcttcaataaaaggaaccagagtgtcttttagaagtgtttgattctagtatggggtagggataatacaagatgaacctggagcatcttgtagtgccagaaagtcagaaattgcttaaaaaagaagagagcattttgaaaaggcccaagagccaacctcaaagaggccccaatggccaatactcaaacaacttgagcaacaaaataaatagtgacactattcagatataacccaataaaatacatatctatgtgtccatactggtataagtaaacaattgaatatacaaataaatagagagaaggtataactgttccttacagaagaatcctggttactgtaagtaaaagaaaagaaggaaatagaaatcatattaaacacagtaataattgttgcagataagatgcactgatgcatgttaaaattaggttagaagtttgagtagatacagaatatttgcacagtttcaaagtaactcccccaagatatgtattaataacaaaaggaaaaatcatgactttcaagtagagaaacttggaggacatcattcaaagtaaaaaagatggccaggtgcagtggctcacacctgtaaccgcagcactttgggaggccgaggcagatggatcacctgaggtcaggagtttgagtccagtctggctaaaatggtgaaaccccatctctactaaaaatacagaaattagttgggtgtggtggcaggcgcctataatcccagctacttgagaggctgagacaggtgaatttcttgaacccaggaggcacaggttgcagtgagctgagattgtgccattgcactccagtctgggcgacaagagtaaaactctgtctaaaaaaaacaaacaaaacaaaacaaacaaataaacaaacaaaaaaccaccaaagtaataaagattaacattgctgggtgtggtggctcatatctataaaacgagcactttggcaggccaaggtgggaggattacttgagcccagtagtttgagacctgcctgggctacagagtgagactctgactctacaactaaacaacaacaacaacaaaaatatctgggcgtggtggcatgcacctggaaccccagctacttgggaggctaaggcgggaggattgcttgagcttaggagtttgaggctgtagtgagctgtgattacactggagcctgggaaacagaacaagatcctgtctcaaagaataaaacaaaacaaaagattaacatcactgagagaaagacatatcaatatcatgaaaaccctaatccaatgtgctgagaaggacacatcatttctttaggtggcaacgaggctgtagtctccactgccaaaaactcactgagtggttgtggactaactgccactctctgggcctcagtctcctcatatgcattgaagaattggggtagataaaggagaggttttcaaataagttcgtttgatcctctgtttttgccaaggagtcttttcctctcaaataaaaacacaggacggagtggttctgaatctacataaaaatgtgtagcctggctggatgaggtggctcacatctgtaatctcagcactttgggaggctgaggcagggggactgcttaaggccagaagtttgagaccagcctgggcaacatagtgagactctgtctctgttaaaaaaaaacaacaacaaaaacacaaaaattggctgggcacagtgactcagacctgtaatcccagaactgtgggaggctgaggcaggcagatcaactgagcatagcagttcgagatcaccctgggcaacatggtgaaacccaatctctattaaaatacaaaaaaattagccagtcgtggtggcgagcacctgtagtcccagctacttgagaggccgaggcatgagaattgcttgagcctgggaggcggaggttgcagtgatctgatatcatgtcactgcactccagtttgggctacagggtgagactccatgtcaaaaaaaattttttttttaattagctgagcatggtggcatgcacctgtagtcccagctacttgggaggctgtggtgggaggatcccttgagcccaggaggtcaaagttacagtgagctatgattgtgccactggactccagccaggacagcagagagattttgtctcaaaataaataaataaaaaagcataacctaaagataacaagaaggaatatcaaacaaacccaactgaggcacagtttaaaatatacttgatcagtactttctaaaatgtcagggtcatgaaggacctcggaaagactgaggaactgtcacccattgagggagacaaaggaggcgtgatgacctaatgatcttggttggcccagctcagataattgtaattggtcatacaagatactaagctcaggggaatttttgcatctcttctgtaaggctatgattatttcaaaataaaaaattaaaaatacaacaaaaagtaatgagagagggagagatagaggtgtgagtacaaagagaaccaaaaagaaaagtggttttgggggctctatctcaaaaagaactgtgggcctcgttgtcggcaagtggagttgatgagaggcaagtagataagatgctgatctgtgtaatcccaacactttgggaggccgagacgggcagatcacgaggtcaggagattgagaccatcctggctaacacggtgaaacctcgtctccactaaaaatacaaaaaattagccggggtggtggcgggtgcctgtagtcccagctaccccggaggttgaggcaggagaatggcgtgaacctgggaggccgagcttgcagtgagccgagattgcaccactgcactccagcctgggcgacagagcaagacactgtctcaaaaaaaaaaaaagaagctgatctgttctgagtgaattatagtgccaaaagtattgtcagcctgtgctgttaagagagactgactgagtcttaaagtcacccttgggctcccagtgctgtatgggtaggaagcagctggacaacactggccagtcctccgggaggccatagtcccagtgcatgcctcagataagccagagaagaatcttccagatgacagagccagggtcagggagctactgccttggagcagaatcagagcccaatcagaggaaaaggttgtagggtactgagccgctaaaatgctttgctggcaggattttgggatagctgtgcacagttgttgcaggtaagatgcatttctgggctgggtgcagtggctcatgcctgtaatcccagcactttgggaggccgaggcgggcggatcacgaggtcaagagatcgagaccagcctggccaacatggtgaaaccccgtctctactaaaaatacaaaaattagctgggcgtggttgtctgcacctgtaatcccagttactcaggaggctgaggcaggagaatggcttgagcccgggaggcggaggttgcagtgagctgagatcagacctctgcactctagcccaggcaacagagcaaaactccgtctaaaaaaaaaaaaaaaggaaaaagatgtacttctgtgacttctctttgccctgcctctgaatgggagtgcttactgaaggtgtctagtctctgttccaccattctagagcaggtgcacattggggtgggcagtccaatcccttggcttatagcttcaagtctctggagcaagaggaactccattaaactggggcggaagtgtctgatatgtgtgagaagcaaaacatttaatgacgataagtgcagtctttgctagtgcttagcactgcacgtttctacatctgcttgtcctccttccagacacacagtacgattgcacttcctaccccctggaagtgaagcacggccacccgacttgctttggccaaagaaggtaaacattatggcttctgagtggaagtatttagttactggcacaagacttcccaatgctctccctgccactgtcaccgtgatggtccagaaggtgacagctcctcatctcggaagccagagtaaggacaacaaaaagcagagccctcactgatctgagatcaacatgtcatctaaatgtttggttttggttgtttaggttgggggctggttgtcaccatggcccatcctgatggaactcagtagtcaaggggagaatgtacgccaggcggggaaaccagagatgcccagcaccccccagaaagtcagatttccttaagcccagtctgggatgtgtcacctggctgctctggcaaggtaatgtggtttgatagctgttgagctattgttgtaatgtcgtaacgtatttcaatggccatttttctttttctttttcttttaagatggagactagctttgtcacccaggctggagtgcagtggcagaatctcagcaatagctgtttttctgttcttgagttgggagagacttagctctgtgaggctcaggagaagaggcctggttctaagaaaggttggccaggccttttcttccacagccattttgcttttaaattcagccttccgggcatgtaagaacaaccataagagcttcctaatctgtcagggaaggaaaggaccgctgcagtggctggaaagtggtgcacaccgccatgcgggtcatcggccttcgcatattgtttctgctgagtagtcctgagtacagagcccagaaacctggtttgagtcctcactgtccacaaactcattgagtggtctgggactgactccatgtacatatcctgtactttgggaaaaaatgagtgagagttttgaagtcaaactgctttgggttcaaattcctcaatctgctgtgaccttaaatgaagaaccttaagtcctgtctgcttccattttctcatctgtaatgtggacttcctagaataacaggaactggccagtagaactgggagaagtgagtgactaaatggatgaaaggcctgaacccggctcctggcaaggagaatgcattgatggtcagtagcatcttcatcatcttcatcatcatcatcactaccctgaccagatgggggtatttcacagtctttttttttgtttgtttgtttttgagatggggtcttgctctgtcatccagactggagtgcagtggcacgatctcggctcactgaaacctctgcctcctgagttcaagcgattctcctgcctcagctctcaagtagctggggttacagatgcctgccaccatgcccagctaatttttgtatttttaataaagatggaatttcaccatgttggccaggctggtctcaaactcctgacctcaggcgatccgcccgcctcggcctcccaaagtgctgggattacaggcatgcaccaccgtgcccagcctgtttcacagtctggtgtgaatataagatgcagatggctctgagtaacttgttcccaatcaccaccccacctaccctgtgtgcctcagagttccctgtgcctcagagttcctcgtgtgcctcagagttccctgtgcctcagagttcctcgctcaggaccagcgccaaaaaggaaattgacaaatatgtggtggattcaattggttaaatggctgatctccaaggtgtgtcccaaacaaaaccaacaacttcccaagctggtctcattcaacaatgttgctgaatgtggtagtgttcataaaattccaacacaagtagttccaaaaatgaaaaatacaccaccaaatgccaacaccacaccaaaaccaatggcaaataccaccccccttttttttttgagatggagttttgctcttgttgcccaggctggagtgcaatggcactatgtcagttcactgcaacctccacctcccaggttcaagcaactctccatcctcaccctcccaagtagctaggaatacaagcacctgccaccacacccagataatttttgtatttttaggagagatggggtttcaccacattggccgggctggtctccaactcctgacctcaggtgatctggctgcctaggcctcccaaagtgctgagattacaggtgtgagccaccacgccccaccagcaaataccctttaccctcatctgatctacatatgagtgaacaatcaattgatctgctgtatttcccacagcagatcattattctcatcagagtatagacataatccaggagtgctgtgtttcagtgtggccccgaaggagttaagtgaaataaagaatattatcaatattgtatcagtcacagatgagaaactgcataccaggatcagtgtaattcattcattggtttatggacaccgggtcctccagggactgtcacaaatccacttgatgttcctgagtgagagatttagcatttggatctttgatttagctgaaagatgtgtaaaaactcatgcagtcagacaactccctacaggcgattcatctctgttggcttttacgtaacagttattccaatcaagtgtcagcagtaacttaagctctgtaacttgcctctgaattcacatttgtgagatgctgggacatgaagaaacagtggcagggacaagaaggcccttctgggagaaggaagccttcttgctctttttgtttctttggaagtggcagacacacctggggagttagtgttctgagggaggaggcagcctctggcttctgaggctttggtcttgcatgaggtcttgtgtttcttgtgcagagtgccaggttggggtggtggggggagagcatgattcctgggagacaggggcactgagggtcctcagagcagctgttggggtcttacaggaacctcaggtccacagctgctccctggctagctcagcagggacggaagatctgaagacctgcatctgatcggttaacccaggtgagaggcataactctgaagttatgaccgtatggatagtgcttagcggtttcttctgccagaatttctcctgtgtccctcaccacagaggcctctgtcctgcactaagtctctttgatatctcatcacctgtgtcaaaagtgaagggaggagagaaggccaaggattgcttgtctcagtgcctccagagagagtgaaagtgcaagtggaggctggctgtggtggctcacgcctgtaatcccagcactttaggaggctgaggcaggaggatcacttgaggtcaggagttcgagaccagcctggccaagaaggccaaaccacatctctactaaaaatacaaaaattagtcgggtgtagtggtgcacacctataaccccagctactcgggaggcggaggcaggagaatcactggaatgtgggaggtggaggttgcagtgagccgagatcatgccattgcactccagcctgggtgacaaggtgagactctatctcaaaaaaaaaaaaaaaaaaggccgggcgcacggtggctcatgtctgtaatcccagcactttgggaggccgaggtgggcagatcatgaggccaggagatcaagaccatccttgccagcatgttgaaacaccatctctactaaaaatacaaaaattagctgggcatgttggtgcatgcctgttatcccagctactcaggaggctgaggcaggagaattgcttgaaccagggagtcagaggttgcagtgagcagagattgccccactgcactcaagcttggcgacagagcaagactccgtctcaagaaaaaaaaaagtgcaagtggactgttctgtggataatttaagatagataaataaagcaatgcaatggcctatccacatgaagtggcctccagtatcactgttattaacagatgatgtttaagatgtgtttggtgagtgctggcccatgttggagaaagcccttccgagaataaagcattcattcctcaagcaaacttgaaaagaaagctcatgaaccatccccattttatagagaaggaaactaaggtgtagagtggttcataaattgagtaaggtcatacggctggtaaaatggcaaagctggacttcgggaccgactctgttgacctccgatgcgatgctcacaaccactgtgttagctcagttttgtagcatggtggagagctatgccatctcacccatcaattgttgagggtgtttgcaggctggtgaaggggcagtcaggcatttccctgggtggagagtgggggcggctttccagcttcctgaggaagcaattcacaggcagttcagctgtgattatattacaggtaccagaggaggaacctgtggagacatctccaagcaaggaaactggcacaaggaccccatcatgctgggctctgagctggagggtccagagtaaggtgttgccaaatcccacattcaagttccctctcacagtcaatgcttgccttctagccagagaagaactggcggtgagaagcagacccactgaggcagtacaagaaattagccaggcagatgacagctctgaaggaaattacacagaaggcagcgcagaaagagctggaaaacacaaggcactgagatgcctacaggatgaagcgaaggtctttttgctgttgtttgtttggttttttgattttttttttttgagacagagttttgctcttatcaacaggctggagtgcaatgtcacaatctttgctcactgcaacatctgcctcctggattcaagcaattctcctgcctcagcctcccaagtagctgggattacaggcacccaacaccgcacccgactaatttttgtatttttagtagaaacggggtttcaccatgttgaccagtctggtctcgaactcctgacctcaggtgatctgccttggcctcccaaagtgttgggattacaggtgtgagccagcgtgcccggcccaaaggtcccttcttaatagaggttctagaaggatggaatggagaggagatgaaagtggcaatttctggagagattatggataagaattttccagacctgatgaaagacatgaatcttcagaatcaagaatcacagagttccaagcaggagatgaaaaataataaatccacaacaggatacatcacagtaaaacaacaacaatgacgacaaaaaaaaaagagaaaaacattagcctaggtcaaaagggtatttattaaagagacacgagggagtctttggggctctggggcatcgtcaggcagctgctgggacctcagtagactctgtgaccagtggcacagtgcttcctcttcagtgtcgtgttttctgtttcctactctaccctgggacttgagagtgtgcaagactgagcagccaacacctacaggggaaggcgggaatgaaacccagcaagaaaaggtccctccatccttggtggtggttctgccagcctcacccacacctttgatccagaggaggtggagcggaaagggacagggcctcagccacagcagacttgcatgcatttaccacttaccctttgaggaagagagccgggagtggtccaggaaagaagtctcctttttcttgtcaaatacccattaggtgagacggttgtgtaaagcccctggcacatagtacatgctcagtaaagccaagagaggcgtttgcttgagagcaggtactgtgcaccagcagtctctatgtgcgacagtcagttctcaccaggagctgcttgagagggaggttctatcatccctatcttacagagattgtctccttgctagtgaagcccacagaggtaccagaacatgaactcaggcagtccagtttcagagtggtcatgaaatttaactttttttttaaataaatggaatctcttctgtcacccagctggagtgaggtagcatggtcatagctcactgcagcctcaaactcttgagatcaagcagtcctcctgccttaccctcccaagtagatatgattacaggtgcataccacttggttactttatttgtagagatggggtcttgctacattggccaggctggtctcaaactccaggcttcaagtgatcctccacaccttggccttccaaagtgctgaggttacaggcatgagccactgcacccacatgaaattttaaatattttctaaaggaaccacagagctgtcaaactgtggaatagggtaagtgcataaaatgacattttggaaaaatgaatggggacgttttaattttacatccccagaattcaacccagccatgtgtagggaacacctaccgtgtgcataatctgctttcaatccgagggagtgacttcgggcacagcttgtccacaaggtcagcaagtggcaggggtgagggggtagtgaaagtgagcgctctcgtgcgatggggaagcccggagtcctgggtcctgcgtgcatttatctcctctgctggccccggggagctggggacagctcatatgcagtggcttcctcaggctccagtgttttaagagccctggcttgaagcagttccatttgggagagtttctccctagcatttggtatggaattattaccaaatgctagagaggaaccctgccaaatgctgtatatcagctaaaacccacactcctaaacaatgaaatatttataataaaaacagaccccggagaggggcacgggctggggcgctcagctgctgaggggctcatggctcaggtgttctgagtgggtcttgcctgctggtacaggtattgccgtcagggcagcacgcgccaggcagtgcggggtgtagctggaccaggtctagctcatgaagagaggagaaactgtgggtcttgccatcgcctcaagccccagaagacacagctgagcttcttcctccctagaagccctcctcccctcctcgtacagtgctcggcattcagcaggcactcaataaatgctgcctgcccgcaagcgtggatacttccagtaacagcaaaaccttgctcatcaggaacccacagggaatgggatccagacagctgagttttcgagagggagccgtaaattattttcatgtaacattttcagatggaaatatctctaagatgcggtgaacatttcccttccttcttgcttggagaatgtggaacaccattaacctttctgtaatggcccagggttgccgctgtgaacctccgctgctgagcgggaggtaatgcagccctccgggcttgcgaggtgtgctggggtgtttgccctctgctaatggcctctgttctcggagcttccttcagtctcacggccgatttcctagagatttttgagttcttccctcgccatcaggcctctagttgtcactgtcatcggtgtggtcatctctcccttcctaaattgccatttctaattggctgtggactagaaaccagaactctaggcttatgagagtgactgtgaagtcagcattcatctgctttgatgaagcatctgataggcctgagttaagggcagaaccttcaggctttgcagcccctgtgccggccatggagagtcattcttgtgtttctccttgatttacagccacagttcggaaaagggaggctacagcctgagaggtagctgctcttcatctgagttgcacagaaaaccctgaacacacttatcacccatctctaaattccctacggacaccagagcttgcaaactgtttcaagagaaccacactgcttatgatcttcaccttttaacaataaacaaagcacgttgactattgcttccctgtttggaagatcaggaaattgaggctgaggaagagatcacaggagactgattctatagcttggagccacccttaggtggggatttggttagagcctgaacaagtccagattccaggaggaacaagatgcatgggtaagtggtgcctgagggtgtctgaaacagggcatttacagcggtatgggcggggctgagggaaccgcagtggatggagagtctcaggggccagcaactcgggaggtcattctatccctctttgtgtccccagttatgagcacagggactccatatatggcaaggggaagggacagagtcctaggacatggagttccacgagggggcagcccacaggagtgaggtggtagccagaggagcccagacattcccataccatggcctgctgggggttaggtgggggaccccacactctctttcctccggccctccagcctcttgctggtacctcccattgctgcactgatcttcatgatcatgcctgaggacaaaggagtttggggttggagtctgcagacatccaagcggctcggcctcccggggcccagcgtggggcacaggaggagggaaagtagatcaggatgtacgcggaagaatcagcacagagcctgacatcagtgaggttgtcccacatcagcacaggctctgcagatgtttccctacggcttgccagctctgcccacgagcactcgtcctgccaggtgggatggctcggctgttggtgaacctgcaggcttggcagggcctctgagacacgtgccttatctccacggcagagaggcaaattgtgcgtaagtcctgctgtaagccttctagaccaagctggctgctcctcaccccttcttcctttccaacttagccctgcttagctggaaagatcaggcaggaggagggcagggtggagcagtgggaagtgcacacacgagcctggaaaacaggctcctggacctagccaggcccacctcttcctcgcatatcttccctgagctctcagtttctgcatcagtaaagtggaataatccatccccaggcttagttgttgtgagggggaaggagaaggaaggtgagggagcccttgatcaattctaagggactgtgcaagggagagatgctgagtttgaggttctcattgcctgaggaaggatttttttttttttttagatggagtcttgctctgtcgcccaggctggagtgcagtggcacaatcttggctcactgcaacctccgcctcccaattcaagtgattctcctgcctcagcctcctgagtagctggaattacaggtgtgtgccaccatgcccagctaatttttgtatttttagtagagatgaggtttcaccatgttggccaggctggtctcaaactcctgacctcaaatgatccacccgcctcaacctcccaaagtgctggggttacaggcgtgagccaccatgcctggcccccttctttccttctgcagagggaatgtattggtccattctcacactgctataaagaactacctgagactgggtaatttatgaagaaaagaggtttaattgactcacagttccacaggcttaacagggagcattattgggaggcctcaggaaacttacaatcatggtggaaggtgaaggggaagcaggcaccttcttctcatggtggcagaatagagagagagtgaagggggaaatgccacatacttttataccatcagatctcgtgagaactcactcactaccatgagaacagcaagggggaaatccgcccccatgagccaatcacctcccaccagacccctcctctaattccacatgagatttgggcggggacacaaatccaaaccatatcagggaggaagtcctatgggcctgtagggacttatcaggtgatcaggcgctgggctatggttgggattggagggtgggcagaacccggagagtggcctgagccagcccacccacctccagtgctcagcaggtggtggggggttccctcacaactctgtccaaagcacacctgggtcaggtgtttccctctctcccatgaaccgctctctgtcctaccttccccaaactggaaatataggtgtttcgttgatttaaaatatttgttccaaggcatggtggctcataactgtaatctcagttacttggaaggctgaggtgggaggatcacttgagcccagggatttgaggcttcagtgagctatgatgttgccaccacactccagcctaagtaacagagcaagactctgtctctgaaaacaacaacaacaaagtttgttaatatgcccattgtataaaatttagaagactctgaaatctatcaagaacaaaagttaaatcacgattaatcccaccatccagaaacaccattaatatgggggtgaatttcttcccatacctttgtttttgtatttttttgcatgtaaaatttacatgcataaataagtatgcatgatgcagttagagaaaagaggctgcaagggaactcacccacgtgttaatagtgattgtcctttggttaattcacagggaatgtcgtgggtcacatgcacgtcttcagaacgagcatatttatagatgcatgcataaaacaggcattgtgttgtcaataaagttttgtaccctgcttttttttgctttccccatctgctaggtctaattaaccaaataattttgatgactgtaggttttcccaaattctaaaaatcgtcgtctttcactggacactggtgttttgtggaatgtggtatgcattcgttcactcactcactcaagagccacacgctgagtccctgtgaggtggcagctctgtgctcactgctgaggacaccgagaggaaaagtcccgtccctgcccgtggagagctcctgctttaacgctaatggccaggctgaggccgtgcatagcagactttagcacgaggactcatggagtgtttcttgtccccacggggtgcagcccagagctggatgtgcaccacactggcgtgcagccttcactctccctgaccaatgcaaatccacccttctctctttcacaacatccatgtcttagatgatacttcgcacccaaaccctccacgtgcaggcagcctgccctccccctttctcccccaggaaagccctctcttggctggtgactacattcacaaggtcaaggactcgagttgttcatttcgtctttaaactcctggattgtgacttatttccggtctcccaggtgtgagattgattcttttttttttttttttttgagacggagtctcgctctgtggcccaggctggagtgcagtggcgcgatctccgctcactgcaagctccgcctcccgggttcacaccattctcctgcctcagcctcccgagtagctgggactacaggcgcccgccaccacgcccggctaattttttgtatttttagtagagacggggtttcaccatgttagccaggatggtctcgatctcctgacctcgtgatccgcccacctcagcctcccaaagtgctgggattacaggcgtgagccaccgcgcccggccgagattgattcttaaaggtaatcttttaaatgttttcctctgggactcggcttccagaatctcagttctgatgtgttgcttttcgtaatgtaacaggacacattcttagacggggtgggagagccagcgacagaattcgtctggcaaacgttgtcttatcctgggtttatccaggtgtgcagctctgtagccactgtgtgctgctgaggcgacacttcctcccggggcacagtgggaaatgtgttcctcctgtcctctatggtagatgcttctcactaagcctgggacttccaagtggcagagacatatcttctatcgttagaaaaccctcacttgcttatgtactcagcctaaagcccaggtaggttagaacagaaacatctgagggtatcgtgcaagccctcagctcagaacattgtatctgggccgggcgtggtggctcatgcctgtaatcccagcactttgggaggccaaggcaggaggatcacttgaggtcgggagttcgagaccagcctggcaaacatggtgaaaccctgtctgtactaaaaatacaaaaattagctaggcgtggtggtgggtgcctataatcccagctacttgggaggctgaggcaggagaatcgcttgaacccgggaggcggaggttgcagtgagccgagattgtgccactgcactccagcctgggcgatagagtgagactcagtctcaaaaaacaaaccaacaaacaaaaaacaaaccaacaaacaaaaaacaaaccaaaaaacccaaaatcaaaacaacaacaagaaaacattgcatctagcttcctggggtgactgggtgggtttcattcacagtccgggcatcacagccatggcagcagatggttgcttgtaaaggcagtgttgtgggggtacattcaggggggatgtagccataacctaattttgggggttaacttcttttgttttttgagacagagtcttgctctgttgcccaggctgaagtgcagtggcatgatctcggctcactgcaatctctgactcctgcttcaagctattctcgtgcctcagcctcccaagtagctaggattacagttatgtgccaccatgccttgctaatttttgtatttttagtagacatggattttcaccatgttggccagactggtccctaactcctgacctcaagtgatctgcctgcctcggcctcctaatgttgggttaacttctaactactctagtgattcagctgattgctgctgctagaaagctggactttttcttacattagcaactgtgtttccaccagtcaggatcaggaaggccaacttccctgctgtacttgtgaaaagatgaataagtaattcataaaatatctgtccatagcccaataggcattccacagagatgacagaagacaggcaaaggggcaagagggagcccagatgcaatgcagtccccaaatcaagttcccttttgtaaagtgcgtcacctgcaaatgcctattgtgaaagagaaagcgcatcacccatgctgtgggttcctgactcaggctgatggggaaagccaaagccatttgtgacaaaagctaggtgacaggggtaagccactggtttgggagtttgcagtgaggccattctgaacctgcaaaaccagatctgacagtctaaacgatttactaacaggaagtgctccggatgctgtgatggacttctgtatttacgttgaatgagttgaatgaatgtcataggcagaaagaactgctcactagggggccgggacagaggctgatggagattcccgttagccaggtgtggagcggagcctccagggcttgccaggtatgctggaaacagaacaccacacaaacatctctacagccctgaagtgcaaagctaaataacatgggacattatgaaaacgactgtcattcttatttaatttagaaaatccacataaaacatgtacacatcatgaataagaatagtaaaggcctattatgtaccaggtgccatgctaagggctaatccactgagttctctaaacacgctcttttttcttatgtggaggttaaggcacagagaggttatgtaacttgcctaaggtcacacagctctaaaattttggagctgggatttgaacccaggtggtctggcctcagaacctgtgctctgctgctttatggtattctcctccccttctcttttagagcaatagaaaaatcaccaccattggcaaaagtaactcgaggagttagcaaggggtgaggggtctggggagatctagaagcagagcttctgagtgggcagcaggcaggggagttggagccctagaatgactatatcaggaatattggctggacacatacctcccttggatacacagcccatctggagctaaagcaaagagatacattgttttatttgaagccagcaaggttcagtgggcactgagagacatccctggggttccctagagctgaagggtgagccggggacaacaagaacctgttgaaaatggcaccaccatcagaattaaaagtccaactaatttggagcaatagtgactgcctaaggtttatcatcctcttatgagtctgtaaggtaagccataaagcctcctgtgcataaatgggcaaaaggctggaggagacacaggaagagaaacaaattgggaagaacaagttggggcagcctttttggaaagaaagttggcagcatctaggaggggccccaaaaccttcatatgcaccgatccaacttcacctctgtcagtggattctaagaaaacaagcagagacgcaaacaaagctttaaccatgaaaatgctctctccaatacttctaagagaacaacaacaacaacaacaacaaaatagaaacaatttagatgctccaaaataagaggttgtttaaataaattatgttgcatccatttgatggaacattatgtagctataaaatcatgttttcaaagaatatttaatgacatggggagataccttgtgctacaaggttagagaacaaaagcaggacacaaaattgtttataaaaatgattcaaagtttgcaaaaaattgatatgcacagaaaaatgctcggaaggaaagatacaaaaggctatcagggtgagattaagaaagatataatcatctttgtacattcctgtgttttctaattattcttcaatgtgcatcaaggactactttatatcagagaaaagaaccattaattttaaagtgttgcaactaatttctagtggtggcaacacattttaagcaatgctgttcatatgtgcattcattcattcattcattcattcattcattcattcattcagtggtcagtgtaggtaaagtgcttaaaacagtgcctagccggttgcagtgaaccgagactgcacattgcactccagcctgggagacagagtgacgctccgtctcaaaaaataaaaaaacagaacaaacaaacaaaaaaatcccacaaaaaaacaacaaacaaaaataagtgcctggcacatagtatgaattatttaagtgttagatatgattcattaatttcttttttttctttttttagaggcagatatcttactgcgtcatccaggctgtagagcagtggtgagatcacagctcactgcagccttgaactcgtgggctcaagcaatcctcctacctcagcctcctgagaagctgggactacaggcgagtgccaccagacccagataattattattatttttattttttttagagacagggtcaagctatgatgcccagactggtctcaaattcctggcctcaagagatcctcctgcctcagtattagtttcttgattagttccatcaacatttcctaatgatctgcatggtgccagggattgggctaggcctagggtctggtgatgaaccatgtttggggtctgccctctgagaagtttcgagtcttggttagaaaggaagctcccacaagcaaagtcttagatggcatccccgaaacagcaactgtagccaaggtagttccacagatctggaccctcagagctagaagaggaccagaaaagctggcatggatacaaccatatctcaaacactcacccagatgaaaaaatttgtcttcggtcaccaatgcagtttcatacttaccctcctatacctttaggggccagaccccaagtctccatctgctagctgatcatcccaagtacaggttgcaaggaccccctgggggattttgtagggcccatgggatctacagcactcaggaaccttgggtgcaagtgcagattcagcctgccagagactctccagggatacaagctcagcccttggggccgcccctcccatttcccctacaccgcaccatccaattgcattttactcctctcttggagcctggcaccatcaacatgcatttgaccttcagcacatatctctttgctccgaggcttccctttctctttcccccaaatccaccagactcgactaagccctttggtggaatcaggatttaaaacaaagcctctatagtgatggtccttccctggctcctggcccaccacccaccctgagctccagtctgttccctgtacaggcccatggccagctctccatggaagcgggctgtgacacagggctctcaggcactggccagggtcagggacttgctttttgcctgactttttcattttcatttgttttcaagttgctacctggtagagaaatgcttcctacaaggcgataaagctccgtatttacccgtgtaagtcccggggattgttactggtgattctgttcaatccatacagaccaggtcacatctatgagccaaagggtaactgtaaccttttccaaaaaactatattttataaatatttgctccctttcatttgtagtggcaagcaaaatttgcacttcttccccaggtaaaaccagggctgaaaattgggactttggaaaagcaaggggccaggtcacagccatgtgctgcatgatgcgcacatttacagcatgggaaagggagtaccagagaaatcaacatcttaagaaaataagttctgggatccccaccatcagtttcgtctcataacctgatattttgtttcagttacaattcagtacaactgaattgtagtctcaacagccccccaaatttagaacttactatgggctatttcattgatttctcctcttcaggaaaacaaagcacaggccacattctggtcagaaagtccgctagcttcataacatttcccccaaacctaattcaaaaccgatgatagctgttgaagacaactgcagggcccagagttgatggtccaggatctattcaggacatttctgttccacagccttgcaaaggagtgggtgtgtgaggttgtaattatactcaatagacctcagcacattttttgttgttgttgttgagacagagtctcactttgtcactcaggctgaagtgcagtggtacaatcttggctcactgcaacatccacctctggggttcaagcgattctcctgcctcggcctcctgagtagttggaattacaggcacacaccactatgcctggctaatttttgtatttttcgtagagatggggtttcaccatgttggtcaggctggtctcaaactcctgatctcatgatctgcccgcctcggccttccaaagtgctaggattacaggcgtgagacaccgcgcccagccgctcagcacatttttttttgcatttgactaactcatacaaagacaccaagaagacatccacattggtcctgctttacaataaagcctgatgtaggaaaattaggattataaataaattactgttaatttgttattttaggacacgcccattcattttacaaatgacattgtctgttgagatgccttaaataaccagctcttccagtgcaatcaggttcaatttacaaaaatttactttataagcatctcttctggcacagagctattaatgcaaagcaaggtgcacctgtagctttaagagaattctggtaagttctttgcccattcactggaaagaacaccagggaccatgctttgcttttctgccccttgttccagccttgtttttgagcgctctggtccctggcccaggtgttctttgttcttgtcaggtgctaactattatcagatctcattctgtggcaaatagcagaaaacccaaagtaaactgaattaagttaaaggaagtttatccacttacaaaacagaaaggtgctggggtggagctggcttcaaatgtggctggattcagggctcatacaaggcaagcagcaccatttctctatctccatcctgccacggactgtgttggcacccttctctggctcctcttggtggcccctgaaaactctggactctgttcttttggtgctgggatggaaactacagttctccagcagtttaacctctccactagcacctagcaaaaaaaaaaaaaaaaaaaaaaagtccaagattcactctgattggaccaacttaggccatatgcctattactgaatgacagaatccagagagatgtgatgcactgattgcctgggatccggggcaggacccccacccagatgcccgcaaggcaggaagggaaggtgaagctgttgctggaggaagggacatgttccgccaggacaacacgaatcactatgctgacttcttccctctgttggaaaaaccggaagaggtgtacaaccttttcttgagcttgtggggcagcagcaccctgggtctgggaccaacaggtcatggcagaatagccaaacagatcagatgcttccccaatttcttcttattcaggaatcacctccacctctaagggcacccttctgaatcatgctctcagggagtctttgaagggtcattcatactgcattgctcatgacagaaaaggctgcaccttggccttggtggagagacaaatgacccctgcagcatagaaaaccctttttcctagtgcaggacaactccttgctgaagccaggtagccttcctcccagtaaaggatggtcgcctactcccctgagatggaaaagcagggttctccatgggaggccacctgggaccctgtggccatgcagaccaactccccacctaacacatgggccctttgcagacctagcgtctttcttctgcttgaagaagggagtcataacctggggattaggggtatcattgtgctaaaaccactgactgtgagtgatcaaaggggtattacagatgttggaggtcatctttatatagatggaaaaactgaggttccagaggagagggaacttggcctcttgattcagaagtgtcctggtccacccttccatcctggagccaatgtagccctcttgggtaccctccctgctgcttttaaatctgtctatacagcaagtcctcacttaatattgttgatggattcttggaaactgactttaagcaagtgatgtataatgaaactagttttaccatagattgattgatacaaacaagagttaagttcctacagcatgtctctggtcacaaagcttcaccgcgcttctacatgtctaaacattgaaataaatatgagctatacatacatttaagagccattaataaaacaagtaagatcattacttaccccagtttttgatcaattagtgagggtggtcatagtagtaatgggttaagtcaaagaatacatgtttgcaaagtgaaaattgtaaggagtacctctcaccaccaccaagttgaaaaacaaaaaatcacaaatatggtggactcaaaatatgtgcagtcgaaagtgcacaactatgagcacttttgtactgtactgtttcttggcatacattagtatgattatcatatattttatgtattttatttgacaataatttatattcattcattgtttcatgttccagcctgatgattccagttcaccatctcaaggggctggagcctgtcttagcaactcagggtgcagggcaggaaccagccctggacaggatgccatctcattgcagggaacactcatacatatacctacactccctcgggttggcaccatgcagacatggctattcacctaccgtgcatgtctttggggcatgggaggaaacgtgagtacccagagacaacccacgcagacctgggaagaacgtacacagtccgcacagatagtggccctggctggaatccatgtttttttctcattacattataaggaaacaatgttgaaggaaacaatattataagaagacctggtgtactatgaaggaggcaggattataaggagcagaagagagtgaagggaaaagaatagcaatatacaaacaaacaaacaaaatgagtagtgttgtgaccaggagtgcaactccaaagtaatggtttgataacattttatgaatcactgccatgtttgaggcgcgaatgacagaggtcagaacaaacctattggtgtgatcagtatcactttcaaagtaggcactttgagtgattgaacgcttcttataaggagctgatgggctccagcctggtgcagcgcttcccagccttgcttttgagctggtccaggagtcaccaaagaactcatttcaccaccttgatttttacccacagccaccacccacctaactcatcatcccaagttcccagtaactttcatcagtttcaagaaattaaatggcgggagtggccttgaggattccgcaggagtggaaggcccgggtcaacgtcccctgggtagggaggggctgcccttagagacagcttcgagtactgaagagtgcaggactcttgggcaggggaggggtgggcccatgggagcctctgccgaaaatccaaggggttccagccctggccaggcgaggcaggggcagcgagaaatactcgagagtttgaaaaggaagagcagagagaggccagacccaagggaggaagatggggaccccgagaaatcctggatacggggaaaagcataggagagccacaaattatgaaagcggccacaaaacacccctggtggggtggggctggtgggtggggagccagtggggaacttttatactttaatgagacgcaggtaggcgtcaagtttcggcatctggaggataaggggcctctgtccattttctggaaccctccacctcccactcccaacaagggccgcgccgggaggtctccccggggacccccactcagcttgctcaggtcctggaggcatgcagagggcgtcggcgccgacagggggagccggagagccccctgcccggccgtctgcggggctcaggcggggcttggcctccgatgagcgcgctgtctctgcccggtgggtcccaccccgcccggccacgcaaagccgtggcagccccctcgcggcagcgcgccccaggcgaagcaccccgggccaccgggagcgcggccctcccgagacgcacgggctccgaggccgcagaagccttgggcctccaggcctggaaggggctcccctggcctggaggccatgggcccggcccagaccggccagacaccgccagggacccccagaacgacgccaggacgcgcgccgggctccgtgcctcccacggcccaggcgaggccggcggctcgagggttaaaaggcgacccccattctgtaggggagaaagtgccttttctccaagtccatatggtcacttcctttcgacctgctcggccctgctcgcctctttgtccgctctgtcacttataaagaatcacttgacttacaataacaggttcaaaagacgacggagtataatcagttgatccacgaagaattggaataaagaacaccccaccgctcaggctatcattcccatagagatagtgatatcattcatgtgattgcgatgctaatttctatacaagaaaaaaaaaacccttgtattttggtatttgttcaaagagaatttcagacacatcagattggaaaatgtgggctgaattcctaaacttttttgggtaggcagagaattttttaaaaacaccactgcagagatttgagcggattttaagaatctcctggaactagcttgttggaggaaagtgattatttcctcactcctccagtgcactcctggcgagagagagagagagagagagagagagagagagaagagagagagagagagagggagagagagcagcagcaaggagcgctgggttctcagggcagggtccgaggatgctggcagcggcaaggcccggtgcccgccgacggcgcgcctggggagaggaccaccggcggtgagggcccaggcccagcgcccagggcagctgcgacgcgtccgtctccaacgccggcacgctaacccagcgctcctcccagcgcaaagttttctgtgtctctcccctcactcttggactggttgcttgccaccgaatgactccttcagctggagaggggtggtgatggggaggctgtggcatgccttttctgtatctttgcttttgatgtcttgtgatgcccgggtttaaaacccgtcagtcatcttgggggagctcagttcgggcaggctggagcaagtcttacctgaatcaatgttttaagtgcccctgtggcttggcgttttgaataatcaatctgtctccatcacttcttaatcatgcgcaacacaggcctctctctctctttctctccccccacctcgctctccctccctgtatcctttttttttttttttttgtcaactcttttggatcctgtctctttgctattaacatgcccagtgtcacatgcgaggcttttctttaaaacaagcccctcattggtgtatctggatacttcttttattattattattactgaatcttttttcccataatgacaccaggatcattatataatcccataacaaagaggctttttgaggcaccagcttttgtcaactctaggacagagaatccataattgcattatccagctttttcctccttcttcccccctcctagcttcccagaaaaccaacctcatgccccactcacacccccaccttgttacttctgcttatattatttaccgaaacgtttgcccagaggacccgccttgcaaagttgccttaaaaaagttattttgtttgataattaagtcctggagcccatcgcatgatgattattctacacccataaggcagagaacctgcgtgacgtttttctcgaagtttaattaccgtatgctaatttccttgcctactacgtgattaattaaaatcatattttcataatcatttggcactagtattgttttagaattatcatgatctcctaaatagtgtctgtaaataaagtcgcctctaatggcaggcgcgggaggcgaggctgaggacctctccgcgtttgtatcgcggcgattggcaacataactgccttatttacattaaatacgccacaaggttacagcgcggatcaacgtcatttgatcgctgatgactcccttaaacgcccgggctgtgactgattcttcgcgtcccgctgtccaccgagattcacccgggagtttttttttttttttttttttttcctcccagaaaagaaacagactttaaatagtttcaggagcaggtaagaattacgctttttcctcgccccttctccgtctctctctcctctctctccgtggcagtctctctctccctctcggctggataaaaaattctttagtcaaaggcaggaatgcaaagtagtgacaaggaaggggctgatatatgtctcagtaacgagtctgacaatcagaatgtagctcttggagaatagatagattttaataagtgtgtttacatgagctcaaggtcagaaccaagctgcgctgtgttaaatggtttcttagttgctagacagagagaaaaaatggacgatcacacaccattctttgtagattattatatcaagggttcagtctctggctcatcaaagctaaatgccgcaagacctatctagttgctgtgaattatgccagggcgacaatggagagcgtttttaatggtacaatgcatttcacctaccagatagggggaggccgagccggggatggggatgtctgctggggctgggtgatgagtatcaatgaacggggcgattctgaaaagaggctgatgaaaatcgagcccgccctgccccggctgggctgggaacagttcgcagggctctgccgagtgggcgagtgaggcgcgcgagcagggcgcccgtcccccctcagccccggaaaatgatcaagtcaatcgtgtgggcatgtttcattattcattgaacacaatcttttacaacgctccgtttacgtgcccgagtttgctcctgacgcccgcgtttcaatgtttaaggtaaggaaaacaaaggtgggggggggatcgcggggcgcggcgcggtgcggggggcgcggcgcgggggggcggcggcgggtgggggggcagcttcggcgtccgggaggtggcaaagtgagtttggactcttggcgcggcccccccgtcccctccccctccccatctcggcgaggcctgccgcccggttccttctcgccccatcgcgattaaaaaatacggtctaattaaatatccgtggctgtgacgttggcgagagaagctgtcagcgggtggggggtggggggaaagaagaggaaaaccgagccggcggctgcggccgggcatcgtatggcgctagagaacttcggcggcgagcgggacctgcgcctgggccgccgcctccccgcccgcggtcccgggaccgttactttgaaaaggagtcccgaggcctggcgcccggcgcgcgatcgggaccccgcgtccagctccggggacccggccggcgccccccacccgcgagcggcccgcgagccactctcaggccccgggaaactttcaagagggtctggggggtggggggagtaaaaaggggagggggtaggctggggccgcggaaacttctgctcaagtgactttccccattttctcctctgcctgggacgggggttcgccttgcgctctttctctggtccgcgctcactgcggggttccggcccctccgcccgtggagagagggtaatttgcaaccttttttttttttcaattaaagttagctgatgcttacaatgtgtcaaacttgcgggcgccgagagccgctgagatctgccattttgtgattgcatcggcctcctgtgccccgggagcctggccaggctgaggccggagagttggtttcagggctgaggtgccagggtccgaacccgcgaccccaggaaaggccgtggcgcctgcaagcgcaggcggcgcccgcagcacctgccccagccgggcctcggcctgggggcccagccgggggccaaagaggaaataaataaataaataagtaacaggttatggagggaaaagagccggccagtcccaggctggagaaatgaggccaatcagagcgaggaagtgcgggcgtgggggctctggaaggcagaggagaggcagggcttgcgcggcgtctgggaagagtgcaatctggggggacgcctcccgtccccccagcgcagatgcatgactggggtaggaatgatctttgctgataagcctttttctgtttgcttcaagacattatttttcgaagatgaattgaggaaaacagtcgtaggcgagactcggggtgtattttaggcaaaaaaaaaaaagttagggttgggggagagctttcctttgatgagtaggaaagtgtccagatctcgacgcgcccatctgttgcagttttgcaaataatttaaaatatagatatctccatatagacggatgtatgtgaagtggaggaaggtcgaaacgcggggaagttagggaaaaagaaagaaaaagggctgggcagagagagacctgtgttgctcactcttcactctgcggagtgaactccggcagggctttctttggggacaggtggaaagttaagtcccccccttttcacttctgtattgtgagtggttcctactgtgtgcctgttggagaacatgtccaccgttcccgagttaggtggaggattggaatgttggggggcggggagcgttggagttgaggacgcagtggccaggggctgggggccgagaaagagcagggcggggtctcagccccgcgtgcgggtggcagcggcggccgggttttgtttgccagatattgttatgtctaacgggtgcctcgccggagacgtgatttgtcagccgccttcgttttcactttagcagaaaatacggcagctgcgaggtgtcccggcctgcggggctcgggcacccggtgcgtcctgggggctgggtcgtgtgcgcgggtgggagccggcggccggcggggccggggcgaggggcgagcgggaggggcggagtgagcgagcgcgcggtacggccctccggttcctcctgcgccttctcccggcagccgccgccgccgccgccgccgctgtgcaatttagcagaaatccgacaggggccgcgtttgctgagcgcatccggcggccgggcagcccgagcgggccgccgggcctggtcggccggtgtagaggcgcggagggggccggcggaggggaccggcggggatgggcgcgggaagcacgcctgaccagagcacgcgccgttccccaaccctggtgtccccggcgagttgggcagccccgcgcgccctgaccttgacgccccagtctccagccagggcttaggtgaacttggggtggggtgtgcgtgcgtgcgtgtgtatgtgcgtgcgtgtgtgtgtgtggaaggggtggtgagactgggaacgcgctgttttctttcccagtttgatactagcaactggatttttactttaagaccggctttgctctctgctggggttgggagggggggcgatcttttcccatcactcacatctttgttcattgttcactgagtggaaggcaggcgacttaaagagacgaaagagaggaaaaaggggtgagagacggagagaggaaaaagaggggggcggccagaagagggaaggagaggcgtggggacagggcccccgcccccgccggggtcgggtttgatggtgaaatagtaaacccacgcacggagggtcgccaggaaagtggacattaccgctttaattaacttcgagatgctccggcggcgggacctggcgtagccgtgacgcgcccccataaatctgcccggcccggggctgctccgagaactcgtacagtagcggcgtcagatccatcccgcgcctcccagtccggagtccatttgcataattggattttttttttttgcctccttctttctccctgaaacttgtttgaaaacccaagtgaaaaccgcgacgatctgcacactcaaaagcaagtgccaagtaagtgccctgcggtggcctcggcgcgccccggggtgagcgcgcaaagccgggagcgaggtgccgcgagctgcgcgccgccccgggccggcctcgcgtgtgggcggctgggcggctgggcggcgggaggacggcctccgcgggctccgggactgcccggctggctgctcgcacaactttttttttttcccccgtctgctgacttttcgggccaggtgaagtgtttgggccacgcgtgtacctgtggcgagactcgggaggcgatcttggggggcgcgcggtcgcagttgggcatcttgcctgggtcgggggcgggcagtcggtcccagtggccgccgctgagggcagagctgcgagcgagcggggccggctgctggtcgcgccgcgccgtaaatgcaagcctgtagccaaatgcttcccccattattctaaggtttgtgtctgcgtgtgcgtgtatgtatgtgtgtgtttgcgctgtgcttttaaacagaaagaaaagcaaccaaaacaagagcaggaagggctttttccttagctcgtcccccttcccccagcatcatttatttcttttgcttgaaggagagtgcagaccttctttgctaaagacagggtcaccgagagattgacaattctgttggaaatgccatcaatcctatagcgaaaatgtagctgcatttataaaataccaacccttgcctgataaggaaagtggtttcacagtgtctcaaattttattgaaaatatgtaatattattataatgattatttacagcgttcagaacccaggggaaaagtcgatttgcttgggggaagactagaaccctagttcttgtttgccggccagcctgggaacttgcctggggctgcgcccaccaccctgaaagctgctgcgggtggtggggggggctcagctttcagtccagggagtcgcagggggtcgcccctgcagccctctggcctctgctcggggagagcccagggcttctggctgaaggctgctttagttatgatgtcattctgatagcggagtgcaaatgtctcctgattccaccattaaccgcctggctgatttgcttggtaatgatagcactgacgtcctgctccctgacaaatgcagaaccgccgagccctaggaattaacttttccccccactgaggagaaacccggctgccagaagtctcagcactgggcctctgcctgtggactttgtctgcctcagtcccagacactgacatacatgacaggcccctgggctgagggacccgttttcccaaagtttagaaaacttttaagactttcatttccagaagacccttaatctggtcaaacttaagtgcgattgtgaccaggcagagatatttgcatgtgaccaatggcagggactctgagaccattgcatggaagacttgcctcctaccttcagccccttaactgtgtcttcatgttaatatcactgcaagtcagccggatttagtgttgatttttaactagtgtacaatgatttaagatttcttttgatttactgttcaaatgaaatttacataaatgtgatgaaaatgaacttaacatctgggcatatgaaaaaaggttagtacctcatatgtcatctgcagggaaagtctctaaaatgctttcaccctaaactgggtttggggaaacagttcctggagacataaatggtaattatggagaacctggagaaaacactttcaataaatttgcattcttttggactagagctctgaaagcccatcttgttctgtgcctggagtggttaacttctgagcaggctggagatcttcgcaactcagcaacttaactgctggccgggctgtcttcacggaagacttagggcaggcagggagcgacagtcacgctgttctggtccaagtcagaggccaataacccccattatgggagaggacagagaggcagctagaaggtgccgcccgacttcccacagttgcccatagggtactgaaggcagtgctgagatgtggaatcattgcccactgaaccccaaagagctgaatgattaggtttgtttgctttgccttaggtaaccaaagaaatttccatcagctccacgagcccattcaagtgaactctgaactccatcttacttttgagcaagagaagcttatctctggcatcaggaaatcagaattaaacagccttccccaaatgtggttgccttttgctcaaaagttggctgtgaatggcacaggtgtttttaaagtgccttgaatggagggggaagaaagacagcaatgatactcatgagaatatagatgaactttttttttttttttataagaagagtatcataaaagaagaaagcaaatagatttatttttccaggctgaatgaggacaattatagctttttaacatctttggatttagtgtttttaataagccttttaagtaagctgaaatatcagcttgcattttgttctcaacattatttaaagtgagacttgatgcaaatttaaaaacaagtgagttttctgcaggtcaacatttgtccatatgaaggagagaagcctcttccatggcctgtctgccaggacctagggcaggccagtgctcagccctgcctcagcctatctccaagtgaggccttagatttcggctggaaggacaggggtggtcaggtggcatctctcaggctgtgaaggctggattttggaatctaaaagcagggcacaaactcgcttgcattgctactagtggggccttgtgagtggaggggcttcctctgaactcacacctgctgtgcacactggcaccttctccagaatgtgccagggcagggtctgggctgaggctgtggaggagttggagggaagggagcagggccaatggggaggagtgggagggaggtctctgtctgcctggttgggctcacctgtgtgcttcatgtggtacctgctcgggagttggaagggaggccttttgccaaggagagggattggttgttcaggtctagactcttcaggctgccgtgatggtccccttggtggcattgaacgtccttagaggagtgagcagataatgtgtgtggtcagaatgcgctaagccagggagtggccccctaggttgtgctggtgatggtggtggtggtgatgtgtgtgtgtgtgtgtgtctgtctgtctgtgtgtgctggggaagggtgctgcctgttagaaatacttgttctgagatgatttccttttcatccacaattgtactatccaggatagactggtgagtttgtaatgtacatgtgtgttggaggggttggggtggaaataaatgaagaaatcaggaaatacaaaagaaaatgcatcttcagaatagagatgctaggaaacacagtccagttttctgaaatccccctcactttttttttttcccaaaagaaggcaaacatggatggaagccccctcaggaaggtgggctgtgcgggaagccatctggcccacctggggtgggcgtgggggcctcccccggccagttgatgccatcaacgggctcctgttgactgtgcctggtgataagggctgctgtggctgcttctgctggctccctgagagtctcctctcagcttctgatttttaaaaaataatttttcaacttttattttagcttcagggggtacatgtgcagggttgctatatgggtacattgtgtgatgctgaggtctggggtacaatgcatcccgtcacccaggtagtgagcatggcacccagtagtttctcagcccttctgccccgcctttctcccccctctagtgtcccccagtatccattgttgccatctttatattaatgtgtacccaatctttagcttccacttatacatgagaacatgctgtatttggttttctgttcctgcgttaattcgcttaggataatgagctttcacttttaaaaatcactgtagatctctggtctttctcttacagtggagtttttgctactataagcagcatcaagcacttggcttttcacatgctctgagcttgctcgaggtggggtttattttccctaagagacaagattcagatgagagtgaggtttgggtggaacttaacagatgaacctgggcatcatttctccagctcagggcactcgtgggagtccgtgctgtgcgttgtaggatgtttgggagcgtccccagcttctaccccactagatgccagtagcaccccccagctatgataatcaaaaatgtctccagacatttctatatctcccttggggagaatcaagcttatttcccacactttatgcgctgggccttgtcttgggcctcttcaggggggtggaaggtcagctgtggtcctacctttggggactgcacaagctggtggggagacagacaaatcccagtgccctgtaagtccagggggttggactgtgcactaaacaggggaagacccatggggtctgagagggcagagaacttccacatggatgaattgtatctgagcaaaggcatggggcccagctctgactgcttagaggtcaattgcacatggaggtggtgtcgggggttggggcggggggagaaccccatccctggcccctgactgtgacatgcaaactaagcagtggaaagcatagttcttaggctctgagtgagttgaggctgggcactttgctggcaggataatgatacctttttttttttttttaactttaagagatggagccttgctctgtcatccaggctgaagtgcagtggtgcaatcacggctcactgtagcctcgtcctgggttcaagagatcctcccactttagcctcctgagtagctgggactacaggtacataccaccacacctaggtagtttttaacatttttttttttttagagatggggtcttgctatgttgcccaggctggttgcaaacccctggcctcaggcagtcctcccacctcagcctaccaaagtgttgggattacaggcatgaggcagtgcacctggctgtccatttttgagtatttgctatgtgtaaggcacagctcctagtgctttacaccttccttatgatgcaggtactatatatgtccagaattcaggaaggaaaactgaggcaatgggaggggtaggtggtgggtctaggattagacccatcctttatgcctctggagttggcatgcttagctcatctactgctgcaaagcatctcccgtgacccacgttcagctgccctttctggggccagatttacagcaggacctctgtgatttgctcctgattctcaaagctcatccaccacaccctgacaccaggcttgggggctggtagggccaaagcaagcactctttggggtggaccaaagcctccaggtaggtggtggcaggaaggcaatgttgatgcttcaaatgcatgaagagatgcaggaaggaaagtcagtctataaggttccccctttcctctacctactattcttagtctatggctttccaatgagaaaattaagtgctgttatgacacaggagaaatgatcaccgtaggcttgagctgacattaacctgaaagttttctatctaggcattacagctttgattacctgagctgtgttcagttgggtctttgattacctaggtgggcctggctcctggggagtatatttctggccccctacctccttgctggctcttcagctggatgctgggaggccacctctccactgctgactctatttgtctatttgggaccactaggctccttcctttttttttttttttttttttttgagacagagtcttactctgtccccaggctggagtgcagtggtgcaatcttggctcactgcaacctctgcctcccaggttcaaggggtcctcccgcctcagcctctcaagttgctgggattacaagcatgtgccaccacacctggctaatttttgtgtttttagtagagacagggtttcaccatgttagccaggctggtctcaaactcctgacctcaggtgatccacctgcctcagcctcccaaagtgctaggattaaaggcatgagccaatgtgcctggcctcctttacattttttaggctttttgttgctttattactaaattacacacacacacacacacacacacacacacgcgcacacgcaccccacaccacgaagtagctttacttaggttgtgaaagcccacctaaaatcgagattaatcacagaaatgcccattcagccttaattataatgatggtctggcttgcatttctgagattccctcataattcccataaatttgaaggagagtttggttcatgcaagtaccagatcgtaggaccctcgggaggtggtattaattcagcagacattcctgcttgtggtttccaggtacaggaggaagggaaggtttggggctcttcggtgtaggtatggagaggtggccacaacattgacacctgcagtggccactattgggtggtgaccccatgccaggcactacattacacaccccgggtgcattatcttgcttagttcttttaatgccccagggaagggcctcccttggggcagcttccgcagtgggcaaactgaggggtgtaggaacttgttgctgcccatgcctgtggcatggccgagcgggcattggaagccagctgcattggcccaggaggcgcgtgtctcagccttgtttgcactcctgcctccctaaactgtccttagcactgagaacaaaatcatccttctgaataatgttaacccgccttgaaaaggaaagttaaaaatgtcaaccggaacttgctactttgagaacatatacattgttgtgaatttgttattaagagggagaaaatatttggaaatgctatgtcagctaacaagtaactatagagacagcaaacagatcacagcccacatagatattacatataaaatttaatctctttgaatagcttgatatttaattttatcttctgaaatatctagaaacacttatcccttattgactagagaaaaaaagtagcttacacaatttttgtgtgtggttattttcccaaaattttaattcccgattaaaatctatttaaatcaaatcaggcaatgtcttccaaattattatggaaaggccgtcatttatatgaagcctattgaaggggctgggaagtcttactgcaattagagctaaagtgctttaattattttgcttccccggccagggcccccagttttggggttgtaatctgttgatgccaagtggctatttcagcagccttaaatctgcaccgagcagagagcgtctcacggatagaacatggctggatctgttcattaaactcagtgcatggattccacagcatcagagaaactttattccccaacgtttccacccgaaagagggtcaatgctggtgggtgggcagtccccctccaacagcccaagaagagttcaaaaggtggaaaagtggtagtgtgggaatgcgaggaggaagaaaagcggccacatgccggcatgaaaggatttaatctgcgcagccgaaacctcctctgatagtggagggcttgcttctgtgctggtcttggcaaagccactctctcactgagtcctgccgccgccgggtactgaggacttgcatgtagctgggaacagtctgaagccacagcctgcctggagctctcatggacattgcatgcaccatttcttaagcaaaaagccagacactccatctgcaattctttttagagatcattggtttgacaacttcatatttattttccgtgtgatttttgttttgttttgtttcagcccccccaccccacccatttccttctttttggctttttcaccctgtgtgtacacattcatcctgaaagtattttgaaaaagcttttgttaaagttggggcggggggggggtacaattggaattttagttccatttaaaatttccatctattttgaaggcagaagaagtacagacaagataacatgaacatttccatcatctaaaaatggattaaggctgcaaggtagcaattttcccctttaataactactgccaccccaagaagacacagtggctttcttagtaggtgacaaacgattagctcagccagggtctggtcatctggttggcattccccatgacagtgccctgggatgtaacggatggtgatatggcttgtcctttggaggggggtggtagggatgtgtatgcccggcatgttggcatgtttgttctttggcgatggctgtctggtgaggtcaagtaatatattccagatattagagtatgtgccatcttccaaatgcttcctgaagaactggttgcattttgacattctgctcctttgtctcactgacaccagcaacttgatcctcacgtctcaaaatgttgacaggagctagattcttgtgagatttttttttttttcttctaggcactgcctggctaaggagcctggccactcaggtgaaaaataccaggcccctgtgtggatctgggggacagcaggagtctgttgttaagaaaactttttctccctttgcatgataatattgctcagatgaaaatcacacaatttttgtgtgatctccaaataccaccttcaataaaataatttgttcattgatctgaagaatgagtggtttccagctgcttccttccccgggacagactttcgcattggaatctgtctctttgactcacttctggtagaggttggcctcccgtggaggccattgtgaaagggccaggcagcctggggaggctggggatggagcccttgtttctctaggaatcagagggcttagcagaatcaaacacaaaatcataatatgataatttgagcttaaacgtgaaggtatttatgatcactgatcttcatctcaaaggtaggcgagtggaattcttgctggactgtgggggccaaggcgaccctccttttactaatctctatcatcaacggactcttaaccttcagagtaacatgaggaaactttgtgtatcttttcactgactgtatcattgatcctgaaggaggagagtctaaaggaggattctttgtgtgcattttgtttgctaattaaattgtttttgcaagagttacacagtccatgtgtgttgcttgatacatccatatctataagttctttttttttttgcataatttaacttttagggttgcttcctctctcaataagatgcttatttcattgagctggaaacatcaagtttgtaaatgaggaagagctggaggcatctttttgttttgttttaaagcagtgtaacaccatgataaagagctcaggaccagtcagatggcaccaagtttgccatccagcctcaccacttgcaagctgtttgtaagcagcgcattttgatctttgagcctcagttttctcatcagtagaactggactaattctttctccctcataaggtcatcaggattaaaagagaaaatgattaaggagcccagagaccagctattcaatgaatggccagctactcttattacttgtgtaatacatgttgttgaatattttagaaatagaagccccaccaaaggctgtgggcttcagtcatctgcagagccgggtgaagaagtgccattcctccttccttcctggctggtctttggggtgatgtacctgggaatccaataactattggctgattgatttcctatgtatctgaagatgcattttaaagggtcagctgagttatggaggggtctggggtctaagtcttcactaaacaaatattctcactccaatccatcaaatgttagtaccatgtatctaggccacacacacacacacacacacacacacaatcacacatgaaaacacatacatgcacacaagtgtactggttggttgctggattcctggtagggacattataaactgtgctttccatcttttccctacagccaaagctaaagatcacaaggaggtcccttcattcctttctttcttccgtcttttcctccctccctccctttctcccttcttcctccttccttcctatctgtctctctatctatctgtctgtctgtctgtctgtctagatatataaagtgtatcctaggtaggatcggcactgtgaatgagaacagaaatgctttgaaaccattgcatcaacacaatagcaaaatgaaagcagtgatgttctcctagtttccatgttccaaattaaaaaaaaaatatatatatacacacacatacacatatacataccagagactcccctaatttgcatactggtgtatattcaagtgttgatttcaaagcagcctaacacttaagcatgaagtataaaattaatgagttgaacctgtgaccactgcattcaagaagagtcacccaagagagaggtggggagtcgaacagagctcctttactttctcccacagaggaaaaggtggaattctgggctggctttccctcaccagagggtatcccaaatctatgacaaaagaaaaatgccagtctcttttggaaagtagggaatgccctagtgatgctgtatgaagaagcaagcctccatcttccccggggaaatttgaaaccaagatggggtcctgtcaatgaccctctagcatttattgagtgcctattagacaggtggccttgggctttgaaatgcaatatcttatttaacttaattctgagaacactctctgtcttttgatggagaaagcgaggcttatccatggtggtgtgacttgcccaaggccaagctgctggtaggtagcagtgctgggctccgtctgaacggaacctatgtcagtgacatgtaggttgcatgcccttcagactgggactcttggcacgtggcctggaccttctctgcaaacggggtttcctagaacagacatggcggttggagaatcgacagtcatgagacagacacacttgttgtagttgcaaagattctaccatactcactccttggaccctaaagggggagacttgtcctgtgcatttctgagcatgggaattattttgcttcttaaaatgcaattaagtcaaaggcctgggaattagagcagaagccaacatcccatcctctgctggtgggtgaggaatgcttcttcccatgctcaataggcatctcctatattcccagggcacccttgcctttcctgtccctaccccgcatctcattcttctttcaggcatcagtccaaatccgtcttgctccatgaagctgtatttgaacacctatccatgccaaaaagagcgcacaccacgatgccatgtgaggcaaggttgcctttcatctgctctcacccttggggttttgggatccaatcctctccagacttgtcagctagccttctatggagacatcagggaggtgtacctggactttatccctacttatcatttgtgagttattaacccaaaccagatgcaaaggtgtcgacattggttgtgttgtaagaattctgaggggccgggcatggtggctcacacctgtaatcctaacactttgagaggccgaggcgagcagatctgttgaggtcaggagatcgacaccagcctggccaacatgatgaaaccccatctgtactaaaaatacaaaaaaaaattagccaggcatggtggcgggtgcctgtaatcccagctacttgggaggctggggcaggagaattgctcaaacccgggaggcagaggttgcagtgagccaagatcgtgtcactacactccagcctgggtgacagagcaagactctatctcagaaaaaaaaaaaatccaaggaactggctttgctgggccagtttctggtctccagaaccccaaggggactgtatctcttcaagggaataggttgaggggtatctgggcccctcccaggaccttgtcccagggcagctcccagctgcaggttgctctgcctgggaggaggcccaggagtgccatcgcattgctgcactggcctgacctcccactggcccgcacatgaactgttccagagacaatacctagctttctaggggcagcctggaagaacccccgagcagctgggctaaacaggctctgagagggaagcattgctagcaggccatatagcaaggagggcttcgtggaccgtctcctgaagggtatgaggtacttaggcctcagtccttaaatattagttgaatagatgaacaagaagtgaagggcacagtgtttggtggacggaacagcaagaatacaggtgtgacagtaggaactgctgcggcaatctgggaacagcacttgggaaggacattgctgtggggaacctgctagagaggctttgagatttggaactgtttggggtcctggggacataacagtgaacaaaccgattcatatctgggctctcatggagcttccattctggtgggagggaactggaaataaacaaataattcaggcctggggcagtggctcacacctttaatcccagcactttgggaggttgaggtgggaggatcactggagcccaggagttcaagatcagcctgggcagcatagtgagaccccatctctacaaataataaaaaaattagctgggtgtggtggtgcatgcttgtagtccaagctcttcaggaggctgaggtgggaggatcacttgaacccagttcgagcctacagtgaacagtgattgtgccactgcactccagcctaggtgacacggcgagaccctgtctcaaaaacagaaacaaaaacgaaacccaaataattcaaatacattgtatatcagatggtgacatgtgttatggagagaaatgaaacagggtatgaggatacagcagaatgggagtgggggtggctgtaatgtcacaccagtcgggcaggaagcctcactgagaagctggcatctgcgcctggacttggcggtggataccaggatgagagcactccaggctaagggaagggcaagtgcagagcctctgagacaggactgtgctaggtctgtctaaggagcagcagtgtggctggagtaaaaaagggatggagagagttaaactagcagagcccatggggagcgggcttcctatctcctctctcactgcactctgggcagcaccaccaggctctgcagatctttgctgagtgtctgctatgtgccaggcacctggacctgacccctgtgattcgtgctgctctagagagacacggaagtatatgcgccatttcaaccgtgcccacgaagactaggaagggagagaactgagggctgtggggacacctcctcacctgggtagtcagtggtgtcctctgggaggactcagggtgagaagaagtcagcagagaacaaggtagggaagagttccaggcagagggaatggcctatgcaaaggccctaaggttggaaagatcttggtggcgcgatctttctttgcatggggaaggggacatctagttggggctgccctctctgctgtgagcgcctgttgaggggtaattcctgtgggagggcatccatgggccactgtggtcttctctgcctgatgccctctcctgccgtccaaagtcaatatcttccttccaagtggcccttccctcttgccctccttctattcttcttcctaggcaaatatctactagacatttactctgtaccaggccctcagagaagtgagaagataaagttagctacaaagacaaaaatgatcaagctgtctcacagggtagttcctgttggggttcacaagggagtctgtgatgcctggctcccctctgcttcccggtcggctacccccagctttagggggtatccgttcacagttatttttgtatggcagcattgggttagacttggttgtgcttcacgcagtctaaagggtgggagggtccatcatgagtgtcacaacagtattttgggttcctctttcctacgcatggctgcagtggtgttccgtattccctccatccttttccatccatgaccaggaaatctccacaaagcagggtccctgcccccaaggggatttgtactttacttaggacctgaccctttgaggaggttcttactccccatccccaactcttcatcacaaagacctatccctttcgagagagggacaggttggcaggaaaaccagatccttgttggtatcgcctgtaggatcacatgggatgttttgatttgatgttgaacttgaaagtacatctcatgcctggccttccgattcgttacttaaattattacaatgttaactttttaattttattcttattatgttttttggtggaaaatgaaatatgtcctggctgtttggatactgaactttttttttctcattattaggttttaaatggttaagtaaatttcattaaataactgtaaacattccaaagagtcctgcatacatatcgtatttcacatcatcgtaacttagatgcaaaatattaaaatgtaaatgactcaatagaaaaattatggaaacaaatgtatgacttttattacacttttggaaaagttgcttaaatatttctccttccttcgcaaaaatctatgatgagttaaaggaaaaaaatattttaagacactataaaaaacaattcttaagaataaagcaacagaccttgtggaacagctttttttttctaattttatctgttcaactctgtgaatatatgttggcaattgtccactcattaatttgattattttaaagtaagctatataaacatgaatataattattgtaaatttaaaacattagttagaacaatattgttcccaagtacataatagatagaggtctaaattttggtatcatgcattatgaaatttgaaccaacagttctttttcctccgaggaaatattgcagtctgtagtaagaattgtctgggaaacatttggtattttattttagtctctatcacaaatttccatgtgattgttctatattaatcatgaaaactgacacgagattccttttccataataaatagcaagtaatgtaataaaaacaaatgataacgctaatgaaaaaattatatttttccccaacttagagaagagttccaacaataggtaggataaaataaaatcaatattttgacagtgctagtgctgtattacgtctggctcattaatttggagacaacttctctgttcaatcccaaatcacaaagtgtcaacaaatagtagttttaacatctactctcattccaatgcatttaatgctttgcaagttatttttagcagaaaatgatttttttgattctgcagatgtatagagattgcattgtgtaggtttttgtcttggggaacaatgaaaaacttttgccattgcaatttgtattcaagagatagttcattataaattccagttcagcacaatcctatatactttttcctatatatatttacatatatgaatatgtgtgtgtatacactcttaaaggccatgttcattcctgttcattaattttatgcaaagttttccttagcttcgtcttcttttagaagaatctacagtttctgatttccaagtaccgattgtcagttgattaaggtcaatgctagcacttattcaggctcttattgactggggccacgtgatagatgtgattgatcggctttagacacaggattgctcatttcccattgtaacactcctttccacctgacccatccctcattaccccgagttcttcatagagtctttaagaacgatccacccccccacccctcaggtgctgtgctgttacattaaggccaaattccatctctcacttgtgcaaaaatatatgggtatcactgctgcctgtcttcctttgttttccagggatcacaaaagcctgggatttagaatagcagataataacatacagtgcatattattgatgctgctttaattgtcttattgacaactcacttgaacttggagaagcatgctaatatttatcatcctgtgaactcatgtgcattttctctactcaagccataattacagaagaatttcgaaactcagatgtctgcctgctgcactgcctcaccttccctgtgtttggacaaaggcttccagaccactgcattgccagctgtctttgctccttgcccctgaagcttttagcaccctctggatgcttctccctctaggggagatctggctaattaacactttgaccagcgtctggccaggatcggggtggcgatgtgacccacctgaggagttgcaaggagggcagcatttgggttgcctagtggttttttgttttttccaagagacagctgtttcttacctttaggaaatgccaatggaacacattagaaagatttagaacaggctgaagctagaattgaggccactgtcctggctaggagacaaaagtccacttaaggagggtttgacaggcttaagtcaatggatggagccatcaccatctaactcatgtctacctagctgtccccatctgccacccatgccaccccatccaccaggcttcagcctcactggtctcctttcaggtcctcggacacacaggctccatcccacttgagggccatagcacacctgtttcctctgcatgggaccccctcatcctcaccttttacctggctgccccagcacaatgctcaggtcccactcaagtggcacatcttcagggaggccattcctgtcctcttctatcctatcccagtcacctgctgtcttgtccttttctgttgtctgcacagtgcttatcttcattgactttattgattgtttgcacacttacccatctccttccctccacaggactagactccccaaagccagggcccctaacagtctcctgaggtctctactcccagcacccagagcagcgacttgcaaatggcagtccattaataaatatgttttgtaagaatgttactttcctaaaagaaaatataaatttaggagtgtgtccttgaccctttgagaacaatgacatgtcatgaaacagactgtcccatgacgcatcctttgttccattgttagagatggaagtcacagctgtgactctctcccagcccaccacgaggtcgccgtgatggaagtgcagaaagaaggttgtctctctattgaaaatatattagcgttattgccaagttgttctccctttgtaggggcactggcttaatcaagggcgcatgttatgatagggacaggcttaatcaagggtgtttattctggcttgggttttggcctcgggggccttttctctgaaggtatttccccgcctataccacttggtctgaggttggccacgcagtccctgctgcaggcctcttgcttgacatcagtacgttgggcacggagcgttggagtcaggttctttgtcgctgctgagagccagctgtgtggagccctgattaacacagataaagttgttagtcgctctgtgttcttgtctttggcagtgcttgatgtgggtccctgggcagaggcgtcgtggagacgagagaagatgctgccccggccccctgattggtgagccgctcatctgactgatgagtgaggtggagtaaccccactggcttcaacgagacactcgaatcacagaggatgattgcagaagggggaaaggactttaaacctatgtcacaccctgttgccccagtgactcctgtcttggggagcttacgatgcttgtgcaactgaagaatctgttttctgagagtgttgggattgtattgctcgcgtatttctccccacaagtcaacaacaaacgagaattcttgcagaaaaataaaagacggtaggaatcagagagggaaagaagtctcgattttctcccgtctgtctcatagaatccttctgcggcatcaaatgttttccttttatccatattatttctttactagttaaatagaaatatcctttccctgtgcacatatttcctctcaagtagactgcaagcttcctgggagcagaattgttctttttcttcccatagtgtgccactgccttgccagctacacactgcccccgtccccaccccacaagaggtctggcactcgagggtgggcggtttgggatgcgtgaggaaagtaataaaaccttaatgagtaacagaagtgaatgaagagtgtgggtctttggaaaatatttagaatgatctcctgttgaattgttcatcatttatagacctcttgggctaaaaactatttgctgtctagcggtagccaaggctagcttttttctttttcaattcaatgagtaaaaaagtcgactcattattattatattttttaaataaggaccctaagagtctaccagggatatttgaagacactattattcaaagccagacattttgggagtgaaattctcatcatgaatgggttccttgatgtagaaactaagaaatcccttggcgttgtgattcttggtgatgacctattgttacttgcttccaattaaggaagggagtcccacgtcccctgggttcttccagctttccgctggggtttgggcattgcctcactggtgtctgcctcccaacctctcttccccagtgtgttcaagtctccagcttcctgttccactatgacttcagctgtttgatggtgtgaatgaaaataagatatgtattcaagggcacccccggtgtgcccccattgtaggccaggtgacagttcatagtcaaacacagggtggaggcagaaatcccaggtcctggcctttgcttggtgattcacttgggtactttattacctacatgggatctgtttccccgtctgtaacacaggggaggtgtgcaagagaccaagagcaggttgaagaatcattagggatgcttgtcaggcatgccggttcctgagctccacctggagaggcagctttgcagggggtgctgttgtccatggactccacactggtccaggtaacccttcccagttcttctctgatgggttacacctcgaacctggagacatggttaaacatccacagctgggcgtggtggatcaagcctgtaatcccagcactttgggaagtgggaagatggattgagcctaggagtggagccaggagttcaaggccagcctgggcaacatcgcaagagcccgtctctacagaaaattaaaaaaaattagctggtgtggtggtatacacctttagtcccagctacttgggagactgaggtgagaggatggcttgaactcaggaggttgaggctgtagtgagctgtgatcaagacactgcactccagtctgcgtgacagagtgagatgctgtctcactgtcacttacagaaaattataagtaaataaacattagcaaaccttatttattgcctccttggttttctccagattgtctcaattagtgacatttaaccaaatcagagagtatttcacgccacaatcacagaggcaattctagacccttatctcctgagaccctgtcaccttacggtgcagacagcggcatcaggaagtgaaccgacctggccctgttcacaaaagagccacatgtacagcgtccactgaatctctgcattcgaattcaaaccaatagaaaatagcagaagacaacaaggaaatgactgattggtcaaaagccttgtctgtgattttaagaacttgtagctttgaagatttctttttctttctttctttctttttcttttctttctttttttttttttttgcgacagagtctttctctgtcaaccaggctggagtgctgtggcataatcttggctcaccgcaacctctgcctcctgggctcctgggtccaagtgattctcatgcctcagcctcccaaggtgctgggattacagacacctgccaccatgccctgctaatttttttttttttttttttgtagttttagtagagatggagtttcactgtgttggccaggctcgtctcgcacttctggcctcaagtaatctacccacccgcacctcccaaattgctgagattgcaggggtgagccactgtgcccaaccagaatcttcagatttctatctggtgaagttggggagatgttcttgaaaggtatagctgcagtgagcatgtgtgattggaaagagacttctaaccttttatcttatgaactgcccatcccatatgagttagaaattctctcataactccctaatggaaccagtgggacaacatgttattagtactgttccaggtatgtctggcttttgaccttggccagcagtggttctgaggaatgattatttctgatgcctactagatttcatcttttaacaaggaagacccttgagtatgtctactccttccttttgtctttttagcacccctcccccagaagttgggtgacattttaaggaggaaggacaagtcactactgtgtgcagatttcatatcagatacaagaactccacttgctgccaaacgggggtttaacctctcccagatccttggttgtgcataattaatgcgtcgttcagcatttgacttttgtgcctttcatacagatttgatcttaaaggatgcctgtggagaagttctgtgctcacaaaagcaccttccatgtatttcatggcttttgcttttgagttttggggagaccctttcttgagttttcctaaagaaggtgatctgtatggatacaatacacaatctctcttaaattattcagcaactatttatccagtgcctagcactgtgtttccaaatggttggaaatgaatggctgcaatatagttactattactaacactaatgttagtattagtcttagtattataatataaacaggaaaagaaggagaaggaggagaaggaggagggggagggggacaaggaggagggggaggaggaggaggatattttaacacgcccttgtggcatgagttctataggtaacttcccttgcattgtttttttactgaatcttcagcagtcctgtgagatggggtcatcagtttgattttccaaacaaaatatctggggctcagagcaccaaatgacttaccaaaaaacacatgcaaaaaggatcacttgagcctgggagttcgaggcttcagtgagccctgactgcaccccaccttgggtgatggagcgagaccctgtcccaaaacaaaaacaaaacaaagcaaaaccaaaaacccacattcagagcaagtggctgagttcaggtggaaaccccccaccctgcctcatcgaacctctctttgccactgtgctgtgttgctgtggccaagctattgcctttttggggaatggaggtggaaggctgaagggaccattcatgaagtcaccaggctctagtgggaaagtgtctagccaagagatagctgcaaacctagttcccatttatgcccactgttgagaatgcttggggacatcctttaaatggtttctctctgggcaaaggcagcactccctgaatctgccctcttgccaagtagaggagatgtaagaacatgttttctattgatttttaaaagcaattcaggacccaactggtaataatcggtgtgacctgtgctgttctccaggcagtcacaagcagctcggagccttgttgtgtgactctgatgtttgggatgtgcattctttgaagattacttctaaagcaaggagtccaaatccttaattcacgattctgtctattcctgtggtgtttacattccaccatggcagaagatcactgtgaaaaagaaagatgaaaatgcacttttaagaagggcttttcttgtgcgggcctcctccaaagaccctaaccctttcccctcttgttgacgccgaggtctgtgtttcatctacagggaacatatacattaataggtgatttaaagctttgtcacactgtggtgacacatgcaggctgagctcttggggcaatgagctgcgtggagcaagtgctggtgtgatttcgggtgttggggcaggtctctctggcatcgtgtgtctgtcaaagggctgtctgcccttttgctgaagtcgggtctgcaagggtcttggggaaagtggctggtgaggctgattgatttgaccagtgagcagagcaggaccttgctagggctgggcactaagagagagatgagtcttctacttagagaagtcgctgagctttggaatctgagagctgagtaatgtgcagacacagggtctgggaagaccccttgattccctaaacactaagacaactacgattcctcttctgtctataccactccccccatatgattcaaaaggcaccataaaggcataacatatacaaggaccaagttagttctgatttttccaatgatgactgttttgatgcctgttgggttttttttttttttgagggggacagatatcaagtgtcaaatactttaaaaatagaattcctttttttaaaaagtggtattattgcttcctcatttttgaggagtttccaaagcacatatggtctgtccatgatgttacacggggtttaggtttaagatctcggtgaacttgatacccatgacccggtctacaaagaacatgtggggtctgtctgcttccctctatccctgcagtcagcaacaccaaggatactcaagactccctatcatcggtggggaataagccaccaggccacctgatcacagagcactccctggatgcacttgagtgtctgggttccagataggcgtggttctacataagactgtgtgtctacattttctggggccaacgagaaaccatttctgatgctatttgggccacccatctagtagattaatgtggacaatgatgaaatgatggttcacaggtggaacctgagatgcactctcaattcccatatggatggttggtgtgggtgcaaatggccttaggaaaagagccaggcttttgcattggtcagagcactgactttttctataatgtgttgaagggggagcaggaactcactagtgttcctgctgatggttcccagggccctttaaaaacagcctccttaatatgttgctgcctgttcaaggcatcgtgtggccttgaaatttaaaaacatcatatagtaaattcgtctacttctttaaaaaattttacttccataagtttttgggaacaggtggtgtttggttacatgagtaagttgtttagtggtgatttgtgagattttggtgcgcccatctcctgagcagtacacactgcacacaatttgtagtcttttattcctcactcacttcctaccctttccccctgagtccccaaggtccattgtgccattcttatgcctttgcatcctcatagcttagctcccacttatgagtgagaacatacaatgtttggttttccattcctgagttacttcacttagactaatagtcttcaatcccatccaggttgctgtgaatgccatttattcattcctttttgtggctgagtagtattccattgcacatatatatatatagaaaagagcttttgcacagcaaaaaggtcagcaaagtaaacagacaacccacagagtgggagaaaatcctcacaatctatacatctgacaaaggactaatatccagaatctacaatgaactcaaacaaattagcaagagaaaaacaaacaatcccaacaaaaagtggcctaaggacatgaatagatgattctcaaaagaagatatacaaatagctaacaaacttatgaaaaaatgctcaacatcactaatgattagggaaatgcaaatcaaaaccgcaatgcaataccaccctactcctgcaagaatgaccataataaaaaaacttccactttaaaaaatatcttctattctccatagggaatactccctggaattcttgttggccctggctggctgtggctggggaccgcactcctagtctccccagggggatctggtgcctccgggggagctggagaagcctctggaggttggaaggccagggtgcataccctgggatgaggcaggaggatttaccctccatctacctcaggtcaacagcattcctgtgatgcgaatggaccctgggtcttttactgtgttttctgcccacctgtatgccatagcccgagagacacctgcctaccatttttttgagtgagtggatatgaccactagacatctgtgcctgcggccatcagcaatccagcataaagttaccccctaaaatgggaatctttgcctgcctaatggagtggcgaaggtgctgagctgggttggagaccaagattagatccactgtctaattctcagtagattgattctccattagatcccagatagatgagcttggtagttctaaagcattttttgtacctatgtaggaatggcagaagggacggattccccactgtaggaatatttaggacatatcttgttattttaaaaagtggctgtgattctcataaaacaaattccattttaactccatttattttgtagggctttaaagaaggtagagaatgtttcgaaatgctgatgatgatggtgatggtgatggtgatgagcagtagcgaggtgaaaagatttggaatcagtttctgaagtgggcacccacaatgctcattccagttggaaccatcaccctttaggcaaatctttaccccttggaagctctcagattatcagcctcctaaccgcagggagaccctcctagtcaaatgtggagagggatcctagctggtgtttccagagggcagtgtgaatgataaatactgttcatattcagaaggaaaaattgattttaaaaatgtgcctttgattcactaatctctgacattgagacattttttgaagtctgttgctataattagaattctataagccatttcatgtctctatcaaaattttaagagacatagaaaatttaaggttttttttggcttacaattcatcatatcaatgcgaatcttattgcagtttgggcttcagtgtggagcagtatttcggggccagagacacgcgttctgtcatcagggctgtgttgagagcagcccctgtgctgcccaacaacgcacagcttgaattttaagaattgcttgtgaattgtgtttctgccttgttttgatttgtttttcccagccaaaatgtggggctggaggcaggagactgtgtcattcagaatctgtgcctgcttccccacccatgggctgtatctgtgtgtgccccggctgggcgggtggacgggaggagtcgcgggggaggcttggttcctggggacatgtggggtggcgccgacagctccagccgggctcaggtgagtcacggctgcgctttgagatgggtaattggtggcatgtggtccgtgagccatgtgtgagagcccttccttagtcataggaaagggaacaagcgtcgcaaataaaagcctcatcagattagtgagtcagaaaagacgctaatcccaacccgatgcttcatttctactttttttttccccttccaaaagcagaagctgttcctgttctttaagaaaaaaaaattaaaatcagttttctaaaagactgatttaaccacaatcaaaagtggaggggggtgtgggccgtgtcactattgctgtatgacgattagcatgaagatgagttgcactttagccgggctgaaacttgttcctaacagaatgttaaatacttagtgaaaagaaagattatgtctatctagttacaccattccttgatatatgctccatgtcagaatgccattgtctcctgggtaaagacggagagttcaaatacccactatctctcccctggtgctccgaatgctcttctttgaagtttttataatccatctgtcatcttctagcaaggagggcacatgttctgtaccactcaattacagaattctcctttgccagctccaatgagacaggaaagaatgttatgggtggttgagagaaactgtcagatatactaaattcctaggattcatacgcacggtgtttttccagggtaggaacacagcccgccttattgttcaagtgcattagagatacagttggcattggggtagagaacctttgattttttttttttttttaaagtctcttccagagagttgtcttaaatttgattgttctctttttgaaaaaaaaaaaaaaaatcatccaaacctcctctggaatgtggacccgccaatgtgaactgaaaatgtgacatttgttttagctaactaggagtcggtagtccaactgtgcagagattgggaagtagcaaagtgcttttgtttgtgtggtttcactttagtgaaataggatttttacttggtcttgatagaagatggtgactagataaagcctgatccccacagaaataattttcatcatcagctgagccgaaagcctgaaccttaaatgttctgccatctggtgagatctgagaaagttagcactggacttaaaagtctttaaaatgggttattttatttaaggacaatctaccttggagtggttagtgtttctagatatcatgttaacttctcactcattgagtcacgggtggttaaattcgttgtcttatgtgaaatgagtttgatgatctcggcttagcctctagtgggtattaattcacattatgaaatatcccagaataatttagcaccgtgtggcataatttgcatttttactcaagataggggcaatgatagtgtctctggatctattccccccctttttttcattcaaaagaggatggctctcgtttgtggctttcagggtgattgtcggtggggtttactcttactaattcggtgggaacatatggctttagagcttggggtggtgagaagaggaaattttagcttgggcgctaaaacctgacaaggaatatttgcggggagatagttgcagctgatgagctaggatttcatgaccctgcgagagtggacatctcctacatgcatgtacattttacacagaagcacatacatgagactaaagaacacgggttcgggtggatgcattaggtttgggggtccacaagtgtccctcaatttgtaaaaggcgtcttttctctttacaaaacaggaaggttttccagaaatgcaggatacgattacagtaattaatttagtgaaacttcttaaatctgatcttctgttcaaactaataatgccaggatggggtggctcaatgttgttaattgaaatctggagacaataaaaaaaatgtctttctgcaacttcaatacagcagtctggaactgtcgggtcaggctgtgaaccaattttcttctcattacttttgattttggagtcaatacaaatttcatcagtgattgtagggtgcaggtcttcgtctgcatagaccccgtcatgggagaatatgtgcgcttggtttaaagatttatggaaaagtggtgctagtgactcaggaaagagaggaaggaaatgctgaagccaacagcctccttggaaactgctgcagtgctcaggggtgattagcatggagaggcattgggctggggggagagtgctggaccccaggaggcctctgcatctgcagaccactgggggcagctggcggcagcctctgtggctcccttgctgttccttccagacctgtgtctttagcccaagtttctctctccttttttctttctctctcccacgtcccctatatttacagctgtggagagagtccttctgcagctcacagaatttaaggccccacagaaacttaagggtagaaaaaaggaaaaaagaggagactcaactttgtaggagtttgtgaaattctgaaagcatcctgggcaaagaggtcttttgtgttgaaacatagatccaagacgtcgtatgcgattcctcatttttcctgcgtgcagtttgcatctgtgtaagtcatgggatcagcccatctatcattaggtattggcctaattggacattttttacgagcccggtttgctatttatgttaaaagcaattcgcagaaatgccctttcttcatgattcggtattggcaatagcgacgtatgtttaatcacattttccatgagtaattatctaatttacatgattaccaatataaaacaggaaaatagaataggggcttaactcagtcctgcttgggcggtgacacaggcgtccagaaagacccgagtgagggcgaatggttgctggttctgtttccttctgtcatatcatggagatttttattagcaacaggagctctctgaagccgggcctctggaggagagaggctatttgggattctgttgtaatgcagtttgaggttcactctgtctgcttgggttcttaacgtttggggctgtcctttttgaagacttccgggagatggaggtcacattttttattcatgttgaaaaatattcatttatcagtattggtgcaactgtaaacaagtgataaagtgacaacatttacaacagtaaaactgacagcatttactttaattttctgtcattttggtaattatatcaatcaagatccaaaactaaaatgatattttagcatgcagtaagaaatgaggaattcagatcttaaaagaccattacaattagctttgaaatgttcgccattttaccataattgtttcatatagcttatatgtcttcatttacagccgaatattctgttgatcttttataaacaaagtagcacccatctgctccttgagacactcctggcgcctattcattgcaaaaataatacatgtcctaatgacttccacatattttgaaatctcccttttgaaattggtcttggcagattatttgcaggtacttgagttgcatctgtttgcaattttgcaaatgcggaagactttaatgttgagcactgcaagagggctattttaatcctcagataacattggctgtcatcaaaagccacatttatcttttcgaaggtggggcaaatgtttaatgttaaaagacagtaaaaggtcaaggccaagtctggggtctgaatattttcctttcacgtgctgtgccttttgcaaactcttccttgcatttctttttatttaagttttagcttaataaccattgccaagaggatgttttgctgataaaatgaaagatcaggaagagagtaaatcagaaataatagtgaactccaggatcctgagctcattactaccatgtggctagcagctgaccagctttaggttgactctgtttacagggaagaactaaacagcacagtgttggagaatactggggccttgaatgctgttgctggcctgcctcccaggaggggctgaagatctgggagggaaggtggtcactgtaaggccagcgtaccttcagcaagctgatgctgctcctgggcggacccattgcaactggaggagctgctcactctaagagtctgcatggggacttgtttcctctttgttcaaactctgaagcccagaacactgaagttaagtgaaggtactttctggattgctgtctttgacctggtcaacattgagtacacaagcaagccatcctgtcactagggtttttggactctgcagaactagggcagcaggacaggttgttaccagcctccttcctagtgtctcctctttggtcctcatgggggtctgtgtgtgccatgtggagctacagtttgttctccactggctgccattttggccatcacccttacatctgagaataagatgttagcccattttgtgtttaaatggaagtagttggccatggagacgtcattggtggctgcaaatatgctaaccatgaaggtgtcgcctacacaacctacaaaaccaattcacctccaagccacttccaatgactctggtgacagaagggacactaaagctgaaactagccccatcctcttgttaaacgtgagaaaagtaggagcttcacagataaccaggtacagcccagcatcttgaggtttaacttaagaaaggcatgctctaatcctggggtgtttctggatatttttctggcaaaaattgttcaatatgtagttgtataatgcgtagttgtttcctgtttcatagatagttgaacatgcctctggcatagaaacggaaagtacattaactgtgttatggaagagtgctttatcaccaccactcctcatcagcgagcaccttggtcatctcaacccattggtaccatttgatagatgaatgctttacaaatgtgtatgtttgtgtgattagttctttagtacataagtcatatgtagtcatcaaaaatttttattttttaaatatttatttatttatttatttatttatttatttaatttttgagacagagtcttgctttgtcacccaggctggagtgcagtggcatgatctccgttcactgcaacctctgcctcctaggttcaagcgattctcctgcctcagcctcccgagtagctgggattacaggtgtgcaccaccacgcctggctaatttttatatttttaatagagatggggtttctccatgttggccaggctggtctggaactccttacctcaagtgatctgcctgccttggcctcccaaagtgctgagattacaggcatgagccactgtgaccggccaaaattttttatttttttattattgcattcaaataagtatagcattaaaaatataacaaatttctgaggttaaacctaagagaagcctgtagcaactcaacccccgctttttcattttgtttgcagttgcgggtggggagaaggtagcgattttgcacagaatgggaactggcatccaaggtttttgctttttctgcgtcatttatattctgatgctttcatatatgggtgattacactttaaagagaaaagacctcacactcttctgatgatcaaaaatttcacactaccaaagggatacatcagggagcagggatggttaccatctttcccttacagaaaaagaatgcagcagcgggtcctgagatgaactaggactgtggtcctggcgcaacagcatgggcgtcaccagggagcttgttagaaatgcaaatcccgggcctcaccccagacccatctaatcggaaacgctgtgggttaggcccagcagtccatgttttaacaagtcctctaggtgactctgatgcgtactgaggtgtaagagccactgcttcaggggttataaaatggcagtggcttttccaaggctagaagcccaatccccatgttccagaactttccatcatctcctagtgtcatcttcgtgtcccagaggctgtgctacaagcctgtagacccagtcagtaagcacggttgtttgtttaaaatgcgaaaaaacagataggtggttatcgggtgcttctttttttttctgagacagagtcttgctctgtcacccaggctggagtgcagtggtgcgatcttggctcactgcaacctccacctcctgggttcagcaattctcttgcctcaggctcctctatatctgggattacaggcaccaccaccatgcccagctaatttttttttttttttttttgcatttttagtagagacgatgtttcaccatctttgccaggctggtcttgaactcctgacctcaagtgatccacctgccttggcctcccaaagtgctgggattacaggcgtgagccaccatgcccagctattggatgcttctttcttctgcctttctaagagatcatttattggggtttttcacaagtttaccagttgatcattagaatcttgaaaaatgtagaggtgactccgatgtctaaaatgtgtttattttagacttgaattctggagaatgccatctctccgtactgcaacaggtcagtgtaaagtgtctgttctttgacttttgagtcctgcatcctgcagggcattaggtgtttccatgttcaggttggggaacatcacagcagttgttcctgtccaggaaatatctgcattttatggagtcattagagttgtctgtttagagtttgctgggcaggataagaggattctcctactcattgcagagcttctgctggagtgtttttgggcagaagccacagctgtgtgactatagtgagatgctgcgaggaaggttggtggtccaagcccaaggccaacctccgttgcatgtcggccattggcaattctcaggtagagctttcttggcagtgagagagactcttggtgagttcaggatggagtcagaaggaaattcattggccacttgctgtgctgccactgagagtccttctctaggttgggaagtgacaggctgatggccttctgttaagaagttatgacccaggcaccagccatggccaccatacttggtagagtctagcgaacctgcaaaggcttcagcccccggagcaggagaagcaggtacaagcaaatgtgtgggcatggccttcatacccccaagcccagtcctgctcctagaaataaggagacaaagaccttcatgcttcagaccccctggcccatcccattgactccacagcctcagcttcagctactgagctctccacaaatgtggctcccactatgtgagactattttgcatgatacatagattattggatatctaaagacctattagaaaaatataactagcggccgggcgcggtggctcacgcctgtaatcccagcactttgggaggccgaggcgggcggatcacgaggtcaggagatcgagaccatcctggctaaaatggtgaaaccccgtctctactaaaaatacaaaaaattagccgggcgtagtggcgggcgcctgtagtcccagctacttgggaggctgaggcaggagaatggcgtgaacccgggaggcggagcttgcagtgagccgagatcccgccactgcactccagcctgggcgacagagcgagactccgtctcaaaaaaaaaaaaaaaaaaaaaaaaagaaaaatataactagcacattatagctgtgagttttgcagatgctattgcttaaggtgaggctaacttataaaaagaagaaagaaaagagtaggtgcggtggctcatgcctgtaggtgctatggctcagctctttgggaggctgaggtcagaggatagcttgagccctggagtttgagaccaatctgggcaatgtaacaagactctgtctctcaaaacatttaaaaattaaccaggtgtggtggtgcatgcctgtagtcccagctactcaggaggctaaggtgggagggtcatttgagcccaagagttcaaagctccagtgagctatgatcgcaccactgcactccagcctgggcaacggagtgggaccttgtccaaaaaaaaaaaaaaaaaaaagaaaaagaaaagtgagttgatttaaagttaattaaaaaaaagtattaagtaaataaaggtctggatggcacaaagttatggtgggaactgtgaaagggggctgtggatgactgaggtgtggaatgggctgagggtggccagtgtttcctgaacctccttggccatcccctggggagggctcctgcacccagcagaagtgtggctggtccatcctggtgagtgttttattgagaggagtcccaccccctcttcacatctcaggctgctggtgggtgcacttctgcgtctcattggcaatgcaattactggcaccatgggaggtctgcaggttcaaagctagtgatgagaaatctagttcaccgctttcagaaatacgggtttggtttaggtggcgatggtggtgcttcatcaaagaaaaactccaccaacccataaaagacaaataagaacacagagtctggtgctcctctgttagcaggagactccaggtgagaggctgagcctgcctggctggtctcctcattgtcctctcttcctccttttccatggcggctgcccaggacataggtcctccaggtgcaggtgggaagggacagtcatggagctgtaccactgagtttccctgaggcatccacatgacaagtgcttgtaccttgtaactctgggctgatgcacgggtcaaagcatggggcttgtgctgactcagaggccatcttccttggtgcctgatggcagtctttgctcctgtatttcaaggctgcgggttttggggactgacagatgggcagcaaggcagtcctgtgcttcctgaagtcagttatgccactgcctctgcgtgtgctgccccaggaagggagggctcatccgtggttggaggcttggagatgcaatgtggacttgtcttgctggtgttcgtggaatgctatggcatccttgggtggccaggtggtcagagggacctgggtggctggtggaaagtgaggggcaacagtgtcgcctccctgcaatggtggggacatagggggacctcaccctcagggaggtactgcctgactctgcgatgcccacactgcctccttgtttgtgtcccagtggcagatgggggctggtttcctcaatatttgggactttctgaggacgcctccaaggaggatgagatataatttctgccctcgtggaatttgcaacatgaatggagagccaaggccaaccctcttgggaatgacctgtgtaaggcaggggtgctagagcaccaagcccgtcaggtgtgggtgctcagggacaggaagttcagggtgatagagaactccgcagcgtggacaggcatgagggaggatgtcctggtgtcccctaggtgagcaaaggcagtgagccccgagaaggaggtgggaggagggctgcttggtgggagcagcatggtgcagctcctctgtgagaccccagaatgcagcacagcgcatagcaaacagtacatgctcaataaatatttgttaaactgaactgaatgggactagagcttcggttgcttatgtggatgccagggctggtctctagcataatgattttggaaagcatttactgggtccctgccctgtcttggattctggaacccggagcccctacagaagccacactgcagtgccatcacccgtggagctggcagcagaacccactgggaccagattccctggcatctcccagggaccatccccccgaccagctccttttattaactcagtgttgaaggagctgcccattgctgaggaaggatggaaatgaaagataacggagtgtgtgcgtgtctgtgaaggtgacgatataaaggtaatgccactatgaaaggtgatctcattcgcaactcggcgactccaatcttctgtgcgttttggccttttctgaatcgctgccccactcagccccaagtcaaaaatttgtttacactaatcagattttcagctactcattctgttgcaagaagaagttaagttgtgtgtgtgcacgcgtgtgtgtatttcatacatttatgggttaaaatcagaccccgcgtttccattgttttctatctctaggttaaaagcttttccctgaatctctcctgatgcatctctctagaaagaaactcccagactgggctaggctgaaatttaaacacacacacacacatacacacacacacacacacacaccctacacacacgcatttcagactacactgaaaaactgcaagagaaaataagaaatccagcaacaggaaaggaactttcagttttcacttccaagtttggcagcctggtgaacttgaaaggttagctatgaataagcataatcagatctttctttttgtccatatttaattcaaatgagacagctctgtgttgacttctaatacagaaaggccacccaccatggtggcgctcccagccaatgaagccggctggtgaaagctttcttaaatggtgctaatcagcccggagaggcctgccctctatccccatcagtattctataattcagatgtgctgataacctgaaattgaatgtgtcaggatgcagacatgtgaagggaagagggaactccaggctagaggagccgggtagctgggagacaatgctgtgggggagggggtttcacaccctcccctgatccccccaggcccccgccccccgcagttgtgcctctgtgtgtgtgtgtgtgtgtgtgtgtatgtgtgtgtattcgtgtgcacgcatgtgtgtgtgttattgttcagggccagagacaaaatggaaggtttcaagttctgaaatatttataggaaagctttggattttgtatatgttaaatgaatcaacagacattttggctgctaaggggtgaatggtaatttgcgattaatttttttttgaagccaaggctattttaaaacctttctcccactttctcatataagagacagacagacacacacacacccaccccagtctggtgagcacgtctcacagggaagtttaacaaaagagtcgctattgtcactgtcccagccggcagcagtgcagctgagggtcagttgctatttctattttaaaccttgatttttgcaaagtttgtcttttgactgttctcattctaatcaggcttagttaggggatccgctccaagctccacaccaggctgtgaggacagagaaagataaaccggggggattaaacaaaaagttctgctctgtcaatagtcgtgtgtgtgtgtgtgtgtgtgtgtgtgtgtgtgtgtgagagagagagagagaaagagagattcattgaccaacactcatctcgcagccatttctttaatttcaaagaaagtgcagtttgtcacagagctctgccttctgtgagctggtgcctttgactttgcatgtgatttgttgggtgtgccttcagggtgctggctcttcagtctcccccttgtgccccatgactttatgtccctagaagacaggggaacagcagctccagccccagtcgtgtcttcagtacctcagtctagcccaaacatttcccaaatgctcgggtgcaatcctctgccagcctctgctgctgccaggagcccagccctcttcaactttgctggttgatgtcttgatcagcttagaagccgcctgatttctgcatcttcccccatgtgctcttccaacctcccgctcctgcaggtcaggagggacctttccttctgcaggtctcccttcatcagagcatgtgtcattccatcctggtttagagacatctgcatgcctcttgtgtgtcctactgtgtgatgtgctccttaagcgctgagtgtgtctgaggcgccttgtccaccccgcatctccctctgcacagaaatgggcaggaactggggagacgcactcagaaaggggctgaattgcctgtggtccctgctcagggctcgccatattcagaggaaaggatagcgaggggagacaggctaggactaggcaggatagtggagatatagaagctgccttttttcgtcatggttccagctggtatcaccttgtcatctcccactcagtccaggctggccttagggacacgggtctgccctcccaatcaagtgggcactcttttcttcagagctcctagattttcttcctaagagactgctctgtcaaagggtaagaagaaggtcccaggtttttgtttctcttttcttttttttttctttttttgagagacagggccttgatctgtcatccaggctggagtgcaatggtgtgatcacggctcactgcagccacaacctcctgggctcatgagatcctcctgcttcagcctcccaaggagctagaactacaggcacataccaacatggctggctaaatatttttagagacagggtcttgctctgttgcccaggctggagtgcagaggcacaatcacagctcactgcagccttgaattcctgggctcaagcaatcctcccatctcagcctcctgagtagctgagactacagccacgagccaccatgcctggctaatttttaattttttttgtagagagggggtctcactttgttgcccaggttggtctcaaactcctgggctccagtgattctcctgcatcagcctcccaaggtgctgggattataggcatgagtcaccacctggccaaggtaacttctcatctccatccccatcacggtcagactgattggcaccatgtggcctgtcatccagaaagaccaagaattcttccctgtggtttggacccagtggtggcttccccaagggaacggttggcatatgtttaattattcattggtgttctcgtctgtatctctctcctccttgattgttttgtctttccctaaaaatatttatttgaaattctgtgatcaaagactgaaaaacaaaatagagcaggatattaaaaagaaaatttttttaaggaggttggaatgtcaagatcatttttattagaaaagtttacaagatgaagccacgaattatttacgtaaacttcatatatcaagcataatactcccaactgtgcctttggtgagtgatattggctggcagaacttggatttaaaataccttctacttaaggcaggaagaatgcattttaattaaaattaacggattttttttcttgatcatattttaacacacacacacgcactcacacacatctgtgttcagaattgataaagaaggaactctggttaaataatccacttttgtctgacaacggaatccgttatagaggtgcaaatatgcagaaagctatttggaaatgcatcctagtagttgtcaggttttattatgcaggaaggtgtcatgtttgttacgaagctgagtgcagatggcagagtggaagaaatggatcactaattttaacaatgattaatgaacagagatagaaaatgaattacattggactatcggaggcaagaaatatttttgtgaaaattttgactcatctgctgtgctgttctctgcaaattattttcagaaattctatatgttgtcaacagttgactgcattttccattactgtctatttctgttcttaagtacttttgtgttattagagatacataatttcaaaataccaatacattcctgattacttagagaaaatatatgtaacagtgtgactgttccatagacactagccataaaagtcctgttttataataatctttcattcttcctcattttatcactacattaggaatgtttgataaaaagaaaaggagggggactcttctagcacacgcagaataaaggaaaaatagagtgaaggtaggaataaaaatgtggtcttggtggcttattgtggtgctgagctgctaccaaccctgtccatctttgcatcccctgcctggcatcatgggaaggaggggccaactccttctctggtgttaccctctgccatttgtggcacaccccgtcctgtcctctgtgggtgcggcttcaggcatctcctgactccctgtctgccttcagacacagggagtatcaccagttcatgaagttgtcccagagattattttttcctctgtttgacccttccttactttagttctttctctctgctccagtgaccctggtattgatagtgagttttcacagtgctttgcgagtctcgctttctttttcagcctatcagcaattgagtgtgtatgtgtgtgtgtgtgacagagacacacacacacacacagaaagagagagagagagatctgcaacggaatacagcttatttgtttatgatatctgttcttggcaggaggcacacctatataatttctcatatggagaaaatggatagtgattttcttttcttccatcttcctccccccgcctccctccctttctctccccctctcatccttccctcccccccagatatattagccacattaaatatattgacttcagggcttctcattttcctgagatcctttgcaatagagaaatgatctactagtgtttagatcccgcgttgtaattggtaggcacttaatttcactcatcaggacccactttagtggtgacctgagtacatttcatagttagtaaatttaggattcttactattgcaggaccacccaatcagagttcagctgtgcatctgtggtcagtgctattagtccacctctcaacccatcactatttaatacttggcttggatgttaatttgaattaaaactttacctatataagggtatagtcctggtgtggttttgacaactccccattctttcctcaagaaggattccctcaagacaagatgacagggtgcttctcgaccctcccagggagtgctggctctctagagccctgacatttgtgtagggtgaagctgcctcctgagaactgcctggtgtctgaacaaatggacgatctataacgacttccttctcctacaaacgagctttccaagttttcaacttgactgttttatttatgctcttgacctgtaaaaacaagcaggctgtttaaaaagcaaaaagtacttcccatgattagagtacttagagttgaaataaattggagaatgaagcgaacattcctcgccgcttcagtggaaaatgtcgtgggggttttccttcttgagcatgttctgtgcttctgcaagccggaactccccaatctcgctggccttagggtctccaagaacggattcatgtgtcttccccttttcttgcttttaggtagtggaattatcttagtgaacatttaaaacctgtttgcgaatggttctaagtcaagtagtttgcatataattatggtcctgatgggaaaacactttggaaaaacaactagtgatacaatgcaagtcccgctcaggttacatagcatatgctaaacactgaggaaacactcacggtctttagtgaacaaggtaggggaaggctccagggagccaatttagaatgtgacttaaggcaagcatggctttttgtgtctctttcttttggcgagtgtgttgagtagcagtggtccctggaactccgcaggaaccctgccacctgcctggggaggccgccctgcacagatctgtacaaggtgggtgtccggagaggagcaggttgaacatgaggactcagtgggaggctctgggtgagcaaggtttggtggagacagtggtcactgggctggtgctcaactggaagttgcaccagggataatttaatggtgtgggatgtagagggagagttacgtacaggcagggagggggagagaatcctacaatttgtggatggagagatcaggaggaatgaaaaagaaactgtagatgatccacttaagagacaagtgattcctaaatatagaactgtctttatgattcatggttggggttgcttttgaggcagtaagtcaggtggattatctataggaataatttgagggtacttgagatttcgacatttgggtctaaacaccaggaaacacattggtgttcaggttacattcctcctcctactatgaatatcttctggctatttaacctgagtgtgttcatgcctgtgtaaatttggctcctggcctgtgtttgtactaggttggtcccccgcctcggcttgtacgaacgaagatgccacagcccagtgtctgtgtgtgcggccttcccactgccattcccggaggcagctggcacccatgtttcacccaaacaggagccaaaggcagtcccgcttctagctggttccagttttcagggacggcactgtttatttttccacagtcgttactgggtttttgttttggttgtgatcacctttatatatccctctgaactaactcatccaatcagaactggagagaaaaatgatttgaaaagtcatttaaaaatacctacttctaaggcgaattcatccaagtcatcagataggtgcacacacccccacactcatttggccacaactgctggtctgtcgcagggcctatgtgtttgatatggtgacaactatgtgtgaaaacataagacccaccagccgacaattcttcgtggatacaaatctctaggcatgtcccgggagtgcatctttttagcctgccaacccctggaatatacattgaagttaagctgagttgagtaattataatgctatggcctatagcatgaactgaagaaaattcaagatgtctgtcatccttctattacctcaggtaaataactgattgacctttttggggctctgatactttactaatcagaacctgaaatctggataacaacacttcatttacttgatagacaaaagaacaattgcacttgaagtaatgtgatttctaaatagacactgcctgtcaaaaataaatgcattagaagtaaaatgtagctcaaggagacaattagcaaacagaggtgacaccgtaaacaggtgcacccattattcccaaagcttgtggcaatatattcgcgtcttttagagtgatggaagatcatgtgacggtttggtgaattatccatcggtatcatctgactgatgaagcccgctgctgttgcagaacatttaaaaatgcatctcacaaattacatggtagctgggaaaaatgcaggttttttttttttttttttaaagaacaatgcttttctaaagctatgtgctagcatacgtaattttttctttgaaaggatggagaccatttcattatgctgggtatacagtcggttaaggttgtgcaaattcattacaatgtttgttaatgtataaaacattttccattctggttttagtgacattggattttttttttttataatgtgccatttctgaaacatctgccatccccttgttacctgtgggcagaagagagagaatgcactctttctaagaatgtttagaaaatcttttccaaaatggaaaggcttgggagataagagggaaaggacagctttttctgtgaatggttaggttggaattttctgggataggaactttaccatgcaataggcaaagaggggctgtcagcagctgctcaatatgccaggagaggaaaggcctggcttcctggtggtctttctgtgccctgtgtttgcacaccctgtactgagcactgcttgcagagtacatgcttctggaagctttccctgtgtttttttcttttcttttttttttttttttttttgctaaagcatgagagatgcttgagggacttatcattttggcagttactatttcttcttgttgctatataatcacaggaaaacagtgtgaaatattttatgtgacctccacattcatctgcccttgacttttctcatcccttctccagaataaccagtagctggagctaaggctgatatggatttaggggtcaagttcaccaggatagctgtattttgatcacaccctctgcccagatagcgaaatgagcaaaaccccaccattctctcgccatgttcctagcagcctccacgttcctgctagtttctagctggggaggtggctcatgtccattttcacacttctctctggtctctcatacatcacagcactttttgaagcatccaggtttctgtcttggagactgaagaagtgagagtctccacttgtgagagtaaccaccttgtgaggtggaaacggttggaagagctccttgccctatgtgtcctaggagacagaccccaggaagtggctgtaggcctgactgaccaaggctctcctccagagacacaagtccgtgcgttttgtgaattaaaacaacaagaataacaaaaacccctgcacagaagtaagaaactggtagaatgaggtcttcagcctttgggatctgtgtcgttgaaagccaagagcacttcttgaagagctgcccaagtagcctctctgggaattttttggacatcagctcatcggagaagtggcggccagaaggcttctgaaggatcccaagtctctaagcactggagagatttcctgatttgcagaagtggaaatacttcagctagggaagaggggttcactgggtttcctcaaagctgttctttcctcttttctcttttttttctttgtaaattaatagataggtaaagttcctatcccagaactttgtaaattattttttgagcagttttaaatatccaataaaattgagcagaaagtacagcgttaccatgtatcttctgacccctctccattaaaagacattttagttgtttccacctttcctctgctattaaatttgtgttagtgtggtacttttgttatgattgttgaaccaatattgatacattattatgaatgaaaattcataatttatattcagattcactctttgtgttggacattttatgggttttgacaactgtattatgacttgtatccatcattacagtatcatacagagtggtttcactgccctaaaaatcccctgagctccactccctcttcccctgaacctctggcaaccctggtctttttcctgtctcccttgtttagcctttcccagaatgtcctgtatttggattcgtatgacatgtagtcttttaacattggcttctttcacttagaaatatgcatttaaattttctccatgtcttttcatggttagatagctcatttctttttattgctgaataatattccattatatggatgtaccacaatcgagctattcacctcttaaaagacatcttggttgcttccaagtttgggcaattatgtgattcataataacattcaataaacattctgctataaacattcatgcgcatttttttttaaattttttactttttaagagacagggtcttgctttattgcccaggctggagtgcagcagcacaatcatagctcacttcagcctcgacctcccaggctaaagcaatcatcctgcctcagcatcttgactgcaggtatgcaccaccacacctggctaattttaaaatttttgtagagacagggtctcactatgctgctgagaatggtcttaaactcctaggatcaaacgatcctcctgcctcgaccttttgaagtgctgggattacaggcatgaaccactgcacctggccatgcagattgtgtgtgtgtgtgtgtgtgtgtatacctaagtttccactcatttgtataaatatcaaggagcatgattgctggattgcttgataagacaatatttagccttgtaagagactgccaaactgtcttgccacgtggctttcccctagcagtgaatgagagttcctgttgctccatgtcctcctcagcatttgatgttgtcagtgttttgaattttagctgttgtgataggggtgtagtggtatttcatttttgtttgcatttgcaagtccctggtgacataggatgttgagtatcttttcatatgcttattttctgtctgtatatcttctttggggacgtacctgttcagatcttttgcccatttttaaattgggctgtttatttcttactgttgagttttaagagttcttcgcatatttcagataccagtcctttatcagatatgtgttttgcaaaaactttctccaatgtgtagcttgtcttttcattctcttaaccctttctcttcttaacacttgtggaaactaagctactttagccagtggcttttatttttatgtggccgagcagcatcgatttgcatttgaaacctgagattttgagaaatttggagtcaaagatacacatgatgtatgttcttaactatgttcatgaatacatatacatgtacacatgtgttcattaacacatatgcatgcatatatgtgcaagaatggaaagaaatgcaccaaaatatcaacagccattatatcagttaatagaattatggattattattttcctctttctaatatcttgtatattccaaattttctacaaatgagcatatataacttgaataaccaattttaaaaagtaaaaagtaaatgagattaaacaaaaagtgacccctgtaaaggagataccaagatagttccgttagaagtggcataactttcatttcgacttcagagatcagggggaccaacgtttcaagtgatatccgtgataatatgtgttctctaaaaacctgctttggaaaacaagcaaatttttagtatgaccaaatttgactgtcgaaatgccagattattttgctaagctcagaatctgcactgcacaatagaaatatagtgcaaaccacaagtacaagtcatgcatgcatttttgaattttctaatagccacattatattttgtttaattcagtgtatccataatattatcatttcaacacataaaaagtataaagaatattaatgagacatttttcattcttccaaatgcaatttgtagtttacactcacagcgcatctcaatttggactggccagatttcaagtgctcagttgccacgtgtggccagtggctaccagcttggacagtgcagttctatgtgatggcagaatgtatcttttttctttccaacttttattttaggttcaagggggtacatgggctggcttgttacatgggtaagttgtgtgtcacggaggtttggtgtatagaccatttcgtcacccaggtaatcagcatgacacctgctagatgtctgaacattcgagtgatatttatcaagcagaatatcagcacagcaagcagcattacctctggtagcacaggtggaacagaaaacaactctccagtttccagttattttacatctcttcttcaagatgcattacttcatagatatcttggggtttgatgatgctatgaagtactttctgtaaagcgatacgtatgttgagttcatgtggtgatacactctattagaaagcctttataattttctggatttttcccccgtttgcatcattccatctctggcggccagaattgtcttagttttgttgtcctgccaagtcttgagctgagtggggtcttcatccttgtggatggggtgagagatccagggcaaagacattgggtggagcgaggttcagggagagcctgccaggcactgactgctggagaccatggcctctgggggagctggaggactccatcctgagtgtggttaggctctggaaatccaccagcttggcagcttgttagccagtgctccctgcccttgtagaaaatgcctgcatctagtttgcacttcttaccctaagaacactgacctacagggtaagttctccttcctcaccttgtcctgggtcagaaccacccaccttttgctggggagtaggaacccaggtgcagaatggtgccaagctctgtgcgtgctcctgaggatacggccatgggggccactggctgtgtctgaccggcggacatcaggcagacttgactgccctgaagatgaggctctccgaggctgtagggaagagatgctgttgccttgcgttggggcacagtgtgtttgagtggctcacagcatgggtcatggaatcagtctgctgagattcacaccctgggtccccatctcctgagctcttaacctcagacacagaactttggggctagtgcctcagttcttcatcaataaatgataatacccacctcataagatggatgcaaggatgaagtgagattgcgtgtcaatgcttggaactctgggtggcacttggtaaatgctagttttcattcttattgaattcaagaatggtcagtcaatgaacaaagccctcagaaggtgtgtgtgtgtgagtgtgtgtgtgtgtgtgtgtaaatacatactggctgcttcctggactacatttctttagtggcccaagtgttcctatctcttgcactatcaacctgcactgaatcaccggcaagagtatctcccctctcccttcactttccctctctcctttcttccttctcagggctgttttgactatgaattaattgtaggtttggggacttgcaagcaataatcaaagccaataaacttcaaaaggatggggaggaccagggccaccgggggagtgcagggagccgactggagctcttggtggctgtgggttggggtggtgggggctttctatgtttcttcaaaggggacaccaagtgtttcagattgtcacttaaaagctagatgcaaaactttggaaatctggtgagaggtgacggtttccaaaacagctatttttatcttttgccagcaagcatgagcccagtggaacggagagttaaacttggaatttcttggcaagggttaataatcaatgtagatctcctaacaaaggagatgctgccttattatactgggaaagttttttttcttaactgtcagtgaagcagtactaattattactccagtgtaaatgaggtcatttcctattaagagaacaaaatgctcagccctgccttgccaattcataccaactatttttcacacatactcagctttttagttttttttaaattttgataaaatccattcatttgtattagaaaagtgtaaaccatcgccataatagttgcccgtgattacccagatgagcttttgtaatgtgtgggttgtttgaataccatgtgttagctatggaacaattaggcagctgaatggatctttaaaacaatcagatacttttatctcactgaaaaaatacattccttggatgtgtactgttaaaccgtaaattccggcgaacattaagctcacgtcaccaggagaactttcggatatatgttgatcaaggacacaaagacatccaaatatcttgtcttcatgttttttttttttatgcaagcaaaaagatttaaggaatattgtagcaaacaaagggtaattgttttagcccagatgttgcttttgcacaacaagcaggttacaatgttcccacagagctgatgagcccaatcagggaaatgattaaaaattgattttgtccctgtaattacagtatgtaaactacttagcttggattgcaaaggaagtgattttctaattacgtatatactctggtgtctaatgattggttttttgaagtaatgaagagagagcactaacgactccttggtgttctgttgtttaagaaagaccatctttagagtaagcggcaacagacaaagagtttaaattgaattttcaacactgttgatgtgcacatggatttgtttattaaagagacaggggtgtaatttgattggctctgagcatcttggctttttttcatgctaaagcatgtaaaaatacatgcacagggcaggcgagctgatgagaggaagcctctccactcctcttttatcatccccgagcctggtccgatattgtagggtatcaggtttctgtgagcttctgatgtctgtgtatcctgaaagcatttagatcgaacaggtatcaaatagcttctccatcaaagttacctttgttttaaaatgaaagaagaggcttcctttggaagcgtgtctgggcagccctacgcgctctgtgttataatatttcagccgtgtcgtatgatgctgggctctgtgtcagggtggcaactgctgtctacctccaacatgcatgtgaatgctcacacgtgcacacatacatgcacatacccacacacacactcatacaggtgctaccgcctgtgtgcggaggcctgatggcagcgtgtccgttgtgggaccctgtggagtgggctaatgggttttgggaaagatcttgccaagtttctagtgcttgtcctcctctttgagacacattgtggctgtcgaataacagctcaggcacctgctctggcagaagttagcagagggtgaccatttctccgttggtatgtcatgccctctgggaggagggtggtggcttcagcatgaccctgacagcaagaaccttgtgggcggtgctgtcttcagcagaatccaactcacactctctctgggccctgtcctctcctacgcgggcttcgtgctggtgacttgggacccgatgttttgaaatgtaggttttattattattcagatatggcgtggccaacagggcaggagacaactgagattgaagggacagtttgttactcacagttcccaagaggaagacatgccatgccacgtggggatcacatggagaagcaccaggattcctgggaggcagaaggcgagaggggagaagagggacaagagcctttatcatagcttcccagggaaaggcaaggcaaggcagggctgggagggtttgaattggctcgtttgagtggtttccacaggcatggaccataggggttgcttctagttgtctggtttctggccatgggcgattagggcaggaggatagtggccccaagtggggaggccctgtgagagcccagtaaaggtggtgtgggcggtgtggtttggactggctgttttatatatgaaaggagctcccggggagtcatttaccaactctagcagggcagtctttctggggccagcaaggccccaagatgtcagggcatcagaaccttttggtgaacacacctgggtcctgggctgaggctggtttgggagctggttccctgtgccccctgggtcctgggccagggtgagcgtggctgactctgggctctccttactcttggtgttctacttggcaggtctcactgctttgtcatggaacacatcccgaatatgcctgcctttcccctgccactgctctctctccagctcacaccagatcctcgcttacttacacacctgcagcagcctcccccatgggtccccctgcctcctctctgaccccctcttgtctgctcctttcgtagcaggcatacagtgcaaatagatcatgtttttcctgtgcccaaaatctaccagtggctcaggataaaaccctttccgactaggtacgtggatcctaaaaagcctatcttcatccattctcccactcactatccatacccaggccgcagggaatgtctcagcgctccttgaatgcaccatctccatccaacctcagggcctttgcacttgctgttcactcttcctgtaccgccgttgcccgcattctcgcagggctcactcccttactttattccggtcccttgccagatgttgcttccttagagaggtcttctctgattgtcactgtcacttcctccagctttattatcttcttagagattgttatttgctggcatattttacttttgtctttcatttgaatctggtctcggaaacatgagctccatgcaggtggacacgatgtttatcactggatccccagaaatagaatagagcctgactgcaggggtgctgggtggataatggttgagtgagtggctgattctccgagagaaagctccctgggagctttccacaccaggacccccttcctgttggaaatctgtagcaacaatgggtgtgtcatttggggccatgttcatcccccagcgttgtctgagaaagagagaatcactcagtgcttggagaaaacttccagatccggttggaggagctgcggttttttggtagggtccttgttgctagtggaacttgagaatatcaagctctgggctgggaggaggtctcagaaccatgggagggaagttgccagcacccagggggtgcacactggagaagacgctctgtgtatcttgggacgcagagagcctgctcttggtagagggggttccgaggcattgcttgggagccactgcactcaagtgtcatctgtggggagacttagttgggcacccagctgtttcccctctggagctctaaaccatgtccttccccgggcagagggccgaaggagccggactggctttctctccaaatcctccttgcccaactcttttctggaaggaaagtagtttccctggctcccaattgccactcactcagatgcctccgcagacagcccctgctcctgctgccagacctcccagtgacccatccggggaagggccatcctgtgtctccccaggaatacactccacctcccgcaggagagaatggaacatgggccaggaggggaaattgaagcagccctcgcacctttcctcccaaccatccgcctcgcctccatctgtccatctgcactttcatccttccatccgcctcacctccatccttccatctgcactttcacccttccatctgccccttttctttcatcctcccttccaccttcagaccctctctttcctcctgccccccttacttttgttttccctcccacttccatttttgcatccatcttcatccttctctccttctctcctccctctctactctatctttcctccatccttccattcccatcctcccgtctgttctccttccatccttctgtcttaacttccctcccctactccctcccatccacctaggtcctctgacagaggtgaggggctggaaggagagtctgacaccaccctttccccaagtgctggactgtcctctgcatgtgcccggggtttgctgtggcctcagtgatggtgacattcattgctgctctcatatcctccaaattgtcatggtgtggggtggagacaggtgtgcactgcccacaggcaggaaactcgctggcctggaggaccgctctgtgctaaactcagggcccatctcagagccatggtgatgctgggggtaccccgtctctgctcatctcttgactggccaatcactctctccctcagagcccatgggtctgagtcgggcaggctgggcttttgctcagggagggtttctctggctccttcagggctcctgtgtaggcagctctgggacgatatgggagggaggagggtgcctcatcccctgtggggagcccttgtggcctcctgctttggtggacagaggggcccgtgcagggctagcttgtatgtctgcgttcagcggggctcattcagtgaacatggctgggctgctgggtgggtcctgccttgcctgtggaattcacagggatgggggtgtgtggacttggggtaggcccactgtgtgtcaggatgggtcagagctgccgaggcaccttccacttcctcgcttggttggtgccccccatatcttcctgtgctcccacttcccctttgaagtccctctctcagaactttccactcctgctcttgtctccccttcctcagagaggccttggaagtacctctggctctaggaagtctccctttctccctcctcgctccccagcagcctgcatccctgctgtactccagccagggtccacccaggaaatggccattcagccttcccttctttagcccctgcaaaccttctcactcccctttctggaagttgcggccactctgttgcacttctgtgccccttcctggcctccagccctgtctccaccagggccctgcctgcacttgcttaagggcttgactcaactctgcccctctcctggtgccctgcctttgatgtgctccttgtcctggcaaccgggaccttcacacgatgggtggtatctgatgggcagacctgcttggcccctgacctaccccagaggccccagtgcaccacaggtgctgggaagggagtctccaagccactgagtgaacaggcctcctaagctcatccatgttgctggggagggctgcgtgggagccttatctgtgctttaagagggaagcaggagccatcagtgtacagcgagtggaatttcaagcactgaaaacgcacctgtggaggttcccttattttgatgaggtgggggctacccaacccccacttagttcataccatgctttttgtcgcctttgcaatcttccccttcccacccctactctgagctgcaccaaactgggctcatggacagagtctcctgggtggcccctcaggttggggtccctgtgggggacagggcaaggggaggcctcacgtccaggctgcttctggttatgccactgactgtgttatgtctaaatacaagtcacttacttgcaccaaaagagctgtttctttcattgaggaagacagaatgactctgctggtgcttcccttcctccccaccctgcatcacgagagcatctgtggtcagatggagtcacctttccccgacccgcagtgactgtaacaacatcagacaccaggagcctcctcctgtttagactggatcagaaaggcacagatggaactaacttgatttcttttcctaagggcccagtgaggctgtactcgtcagctgccctactggcgtgttgggctaaccttgcccacgcaggtcagacacccttgcataagcccactaatctgttggaagagcacagcctccaatgtagccacgaggcttgtgctgggccctttcatgatttagagcatagaacctgaggggtttgtgcccatcactgccccggtgccaactgcaggagacggtgttctgatcaatggcgtgaagctggacaaaccggtgtgggacttcccccgatgaagactctctgtgttctcctgtcattggaatttacagggcctctaagtgaatggcccctggagaatagtcctagaattttgcaagtcatgagcttagatataaaatctgagtgtgtctcccatctcctgcaaccccctccctaaacataaggaggtcgtagagcaaagcaaataagtgttttcagagccggctgggtgctggggacctgtttagctcagcgataggacagaactttggaaagtgtagcattgggcatttgttcctcactccttagattttgagtgacacggggaaaaaaacaaaaaaaaatgcaaaagatcatctggttcagggaagagagagagacagacagacagacactgagatgtaatttctttccgtgttggagatggttgagacatcaggttttgctttatgtctcaagataggcaggtagaaatgtgtttacagacagcagcttccctgtggcaccctgagaaaacacttttcgagcatgcagtcagcaaacacatttttggttgccagaaatcagccttggagttgaatgaagtgttgcaagccagtggttcaatcagtacaaacttcttcggctggggctgccaccagtcctacaaatgtatcttctggttttccatgggcagaatcagattttctgaatccatagcgaaattctacctctgtgatcagaatttacaacttcactttcagtaaaatataatttattaagggaacttatgtttgccccataacatcccttccgtgacatggcaaaacaaatgagaatccaaattgcactgggtgaggagtgggctggagatcacaggctgggggctggccttccttgattaccccctagccagcagctctgcatccatcatagatgaacatcccagctttccttcttgtcctttatcacctctgagcatgccgtaggaggtgagatcacccatgtgggacttacatcagtgataaaacagaatgaagaagtagaaaatctcactggctgctgctttcctggtctgggttcgggagagaggacgttgatgccaaacacaacatctctaagcctcagtcagttgcagattcccattctgtatccactggctaccaaacaggtttggccagttgaaatttgggtggaattttggtctactgtagagggctccataaatcaatcagggaaaaagcaaggacccttgggtacttcttcactttgagaattctaaagaagagagacagcgagagagaaagagagagagagggagagagagagagagagagagcccttataatattagctcctatttcttctgtcccatatagagaagataagagatggttagaagttctttttgtgcaggtggcgatttcccactgaaaacaagctgaggaaatttggttcattgcagcaaaggtcacatagttcccattttttaaattgctcaaagaattgggggcagtggggctattcaagttttttaggctctcaactaacccagcaaattgttactttggatgaatgctgtttatgtgacttactgaagtcgacttatgtgacatttacagtttctaacaggtcttatttttgcagttcctgaccaccacggctttaagaatatccttcaaccgggagggagatccattgctttaagacttgcctggtaaggaccatcgatttgtagtttgttgaactggtgtctgtctgagtttgtggggaagtccaggctgccttctctgggctgctgatccctatgcagagctatggagaaacttccagagtcacaggtgtctgggaggtagcatgggttccatatcttgtgggcggggtgaactacaatgtggagacatgttcttgagtctctgaacaggttcccccatgaggcaaagcccaacaagggtgacttctttctctcttgcgtgacaccctgagtccctatctgccagccagcagcctggaaccagggctgagagctggtggggcttttgctaaaggccgagtgacctcgtccaagtgccacctgtggtcgggctccccatcactcaccaggtgactcagtggcttggcccagtcttggacaaatcctgtcccaaagctgctccgtgtttgtcacctcaatcagactccagattgcaaactcctgacggggtgtatttccggcatgggagctgatacaaacttaaaatacaaaacaaagggtgacatatgtatttgatatctttggtggcctcatctgaggctgcccctgatatctctgttaactcaccctcggttgtaattagcccagcccaccttctcctgaccacacgtctcagaggtcactacataaaccagggaaattgatagcagaattatgcactcagaaattaattttatgttgtactgaatatatatttttttttattgtgactttatcttgctggaaaagtgcttacttctgattttgtggatattcctgaccgtggattacttttattttgatttttacacaacagttatattagaaatttgctgttttattcttaccttcttagtaaaaatccttttatcacacaatgggtaatttatatccattaccaagcctttcaatccttttcagtggggctgtcagtgccgttggcacagtaatgattaatgtgatctaataatagtgtaccattatattaccttagtaaaacatgtaccaacaccctattccgatctaccaaattcatagcttcctataatatttttgttgaaagacaggattactatttttcaaagctgattttttcccctttaacatatttaatgaaattcacaattctttgccttagtaatcctgggcatgtgactgggcttgatgggtgaactccacatctgtaggccctgttgtgatttgtcaggagaaaggtccaaccatcccagtgatctgtcagagagattattttgtttttgttgggcctggattgttttgccttaaaaaagaagaaaaaaaattgttgggtttccagtcctttctgatgcataataaggaaggtgtgttttagattgaaaggcaaagtaggaagcaatttggttttttcctcccctctgtcacctgcttctgtctgccagtgaatcggaggtatagccgagccagtggaagtggctttaaaccgcttccccagaaatgcccctctctgacccatccactcctctagctgtggccaagcctctctgggtctgacatagggtctttcacatttggcattattgaaattttggactggatagcgattggttgcggggccctcccgtgcactgcagaatgtttgcaacatccctggtctctgcccactagatgctgatagcatgcctccaccaacacttcctccattgtgacaatcaaaataactccagaaatcaccatatgtcccctggggggcccaatcatctcttgttggtctaacctataggaaaacgagcagatatttttggcatgtcggggaattcctgtcagagttccagagttccatggtgctttttcggaagtctttggctttgggagagaagatgtgtgggtgaagacgacgcagggcatcctttccttggctgaaatacagccctcttcctcctctctccctcctcctctgccatgagcctggcccgagcgagggcctgaatcttagcgtcttccacttaaatcccattataatcacgctcatgattgataacattccaccttttcaaagggctttaaaatctgtgtcaaccaaggatgacattattgtagtgcgggcgagatgtattcaaacaattacacgctcaaatcaaagtgggaagttttgtccttctatctcggcgcctttgtgtgatgtggcttcagccagcaccacagtcctcacagccccagagaccttcaacagaaaaataaatgggaagaaacaggttttgcccttggtaccattcagcttggaaggcagcttgagtatttgggctccttagggctagagggtgggggagcaaggagagattgttgagcataggagagagagagagacagacagagaaagagagacagagacagagacagagagagagagagagaaagagagagaccgagagagacagaaagacagacagagagagaaagagagagagaaggagagagacagagagagagagaaatccttgtttttgatttggaacaaaaactactgctgcaactttggctcgaaatatgcaatcaactgaaatcaggaaaagtattttgaatacaaaatttatattgaaatacttgaatcttgatacgtgtgcacccacatacatgtatatatttaaatcaaggatatagataatgaggaataaagcttctgtcataaaaatattgcctgcagtatttgcccttagataattctgccacattggaatacagttttgtactgttaacatttccatatgagacactcttgcttgtttttacaactgatccttgatgataacagcaaatgaggaaatggctctgatttacctttgtgttaggaagatttggaatccatcgtgttatttggtgcaggaagcattttagtgacctactcctttactggtttctggtctgtctctcctactgcgacgtaagagtggtgagggtaggggcttatgtgttttgttccttgtgatttcctcagttcctgaaatggtgcctgatgcacaatagcttctcaataaagctttggtgactagatggatggatgggaggatggatacatagatgggtggatggatggatagatgggtggaggggtgggtgggtagggtgatggatggatggattgatgaatggatggctggatggatgagtggacggatgaatagatgagtggatgggtgggtgggtaggtgggtagatggatgggtggatgggtgggtgaatggatggatgcataaataaatggataaatgaatggatggatggatagatgaatagacggatggatgggtggataaatgggtggattgatggaggatggatagatggatagatgggtggatggatgaatagatgggtgggtggatggatagatgggtggttggatgggtgggtggatgggtagatagatgaatgggtatatggatggatggatggatggatagatggatggatgggtggatggatgggtgggtggatggatgggtgggtggatggatgggtgggtggatggatgggtgggtggatggatggatggatggatggatggatggatggatgagtggatggatgggtgggtgggtggctggatgggtgggtggatggatggatggattgatggatgggtggatgggttgatgggtggatgggaggatggatggatggtggatggatggatggatgaatggatgagtgggtggatggatgggtctctatctcaagccctaacatgtaccttagaatattgggctcattgatccaaatgaaatctcacttttaccatctattcattcattggcctcccaaacattttttgaaacctttattttcaaaatctaatgatcagttataacaaggcattttcttttagtctagtgttttaaaatggaaaaactatgtctagaactgtgctaggcaacctctgtgaactgaaaaccaccctgttataaaaatgtctttaaaaatccacaagggcacatacacagatgactgggactgaaggcgtggaggtcacgtaggcgaagatgatctctttcaaagtaggatgtggatgagggatttatgaggctgaaaggacttcctgcccacgtgactggatgtccgtctcctgggcaaacctctgcaatctgcactatattccatgttcttctggagatttttgtgtgtcctcttcagccctgccatgacttggtctctgtgggacttgccactgctcagtcctattaggtcagctgtcttgaggggataggctgaggctctggggagtggggttcccaagttctggcatggtgtatgcaatgtacccatctattggaaaacttattctcagtgataagagtggtccaagttacctcaccttgacttttaaactatagtaccatggacatcatagcagtaccagtgagaatgtactgaagaaaaaagataaatgacctctctgtctgacaatgcatagcaaaggtataggctttggaagcagatttcctgggttggaaccctggctccaccattcagtagctgtctgacccagtgtcaaggaacttgcacctcagttttctcatctgtaaattgggaacaacatgacagtctggtagattacactgtgtgatgcacttaaaacactgcctggttcaaagtaggcatttagtacaagcatggcaccgttgttattttcatttcctctattccatcatccttccccctttctccatctttattcaagattaatgaaaatgtaggccattttcagataattaggcttttcctctcagtctcataccagtgctaggaaccccaagatgttgctaggcatgtggtctttccagcatcccttgggaccttggttagcaagttcagagaatgtcagaaagggtggtgagtttcctaagccaacttctccatcccattcctttgtgaaggagcattgttgacacatcactgggggcttgggatttgcttggtgtttggagaacgcattctgagatggatgccacgtggtcatggtgggtgggtggggacagccagcccttaaaagggaggggaggcctgtggtttttctcctccaccccctcacaaatgagactgttttccaccatggcccggttttatatttttagcttccactgaaatttaatgttttgtttttggtttattatgtatgcaagtatcttgctgataaattacatgtgtaattgtaccatcgtaaccactgctagtcagcgacaacatataattaaactcacccttgtagtcattgaacttttctgtccctgacaagatcactgaccactccaaggagggcatacctccacgtatgagccatgcgagtgcctgagaggccggaccaccccgggggcccccgtgctttcctgcacatgtgcacaggccgacttcccctggatggccacacatgggatgcaagggttagctcatgaggcccaggggtgcttctctctttatttctgtgtctatgcctggatgattattggctccagagtgggtgcctggtaaatacttttgtgagtgaattggaattttcttcagtcgcctctgagccctcttttctcatatgacccccaatgcctatcccgctcattttttaggggtgtttgttacgttgctcttatgcctctatgccaaggctacagcctgtgagtcacatccagcacactgcctgtgtgtgttgggttttttgttttacatttaaaaatttaaaataattgcgataaaatacacataatataaaacttactatcttgaccattttaaagtttagagttcagtggcattaaatagttacatcactgtgcaactgtcaccacctcccatctctagaacgttttgaaacggaaactctatacccattaaataactccccattctccctacccattccaggtcgtggcatccactatgcacctgtctgtctctgtgaatttgactactctaggtactttatataatggaaccatatagtatttaacattttatgactggcttattttgtttagtcgaatgtcctcaaggttcatccatattgtggcctgtgacagaattaccttcccttttaaagctgaaaaagattctgctatacagtatgtatataccacattttattttactttttgttcgcttttcttttattttgggacaggatcttacttttgttctccaggctggagtgcagtggcatgatcatagctcactgcagccttgaactcctgggctgaagtgattttcctgcctcagccttctgagtaactgggactacacgtgcacaccactactaatttaaaaatttttttgtagatatgggatctttctatgttgcccaggctgcacttgaacttctgggctcgaatcatctgccagcctcagcctcccaaagtgctgggattacaggcatgagtcactgcacccggccccctatgttgtttatccactcacccatcaatagacacttgggctgcttccacctcatcactcttatgaataatactgctgtaaatgtgggtttatatgtttcttttttaaaaaattttactttaagttctgggatacatgtgtagaatgtgcaggtttgttacataggtacacatgtgccatagtagtttgctgcacccatcaacacatcatctaggttttaagccctgcatgtattaggtatttgtcctaatggtctccctccctttgccccccacccaccaacaggccctggtgtgtgatgtcctgctccctgtgtccatgtgttctcattgttcaactcccacttatgagtgagaacatgtggtgtttggttttctgttcctgtgttgtttgctgagaatgatggtttccagcttcatccatgtccctgcaaaggacatgaactcatccttttttatggctgcatagtattccatggtgtatatgcaccacattttctttatccagtctatcattgatgggcattttggttggttccaagtctttactttgtagatagtgctgcaaaaaatatatgtgtgcatgtgtcttcatagtagaatgatttataatcctttgggtatatatccagtaatgggattgctgggttaaatggtatttctggttttagatccttgaggaattaccacactgtcttccacaatggttgaactaatttacactcctaccaaccatgtaaaagcattcctatttctccacagcctcgccagcatctgttgtttcctgactttttaatgatcgccattctaactggtatgagatggtatctcttcgtggtttcaatttgcatttctctaatgaccagtgatgttgagctttttttcatatgtttgttgtctgtataaatgtcttcttttgagaagtgtctgttcatatccttcacccactttttgatgggtttgtttgtttttttcttgtaaatttgtttgggcctatatgtttcttcaagaccccactcttaattcttttgggtggaattgcgggatctatggtaattccatgtttaattttttgtggaactgccatactgttttccatagtggctgcaccatttggcatttctgccagcagcgtgccaggcctccacttcttccacacccttgccagcacttgttttttccatttttatgctagcagccatcttcatgggtgtgcagtggctcttagtatggttctgcctgttctcatatggcctatgatctaagagtggcttttccatttttatatgattgaaaaaaatcaaaagaaaaataatatttcgtgataccgggacattgtatgaaatttaaatctcagggcccataataaagttttattggcatgcaggcactcctatttgtttatatgttgtctgtggctgcattgacactacaaaggcagagttgggtagttgagacagagactgtgtggcccgcaaagcctaaaatagttaccacctggcactttatgggaaacccttgccaatcctgccctatggtaagtgttatatgctttatctgtttaacctcctctctaatccattttgcagacacagaaactgaggctcagcaaagataagtaacttgtacaagtcacatgttacctaaccaggacacatgtacctgtctgtgtgactccaaatcttgcactcctcactaccatattaaatgaacaaaatcatttgaagattgctgtttctagggaactgttttttttttttctctttttcttctttttttttttgagacagggtttcactgttgcccaggcttgagtgcagtggtgtgatcactgcagccttgacttgacttcctgggcccaagccatcctcttgtctcagcctcccaagtagctgggactacaggcatgcaccatcacactactttgtttgtattttttcgtagagacacgtttcccaggctgatcttgaaccactgacctcaagcgatcctctcaccttggcctcccaaagtgctagggttataggcatgagccactgctaggcctctaggggacttctttgggtgtttttagtaagcctgaggtcaggtcctagttgagaaaaaaaaaattgtaattatacaaagatgtgatgttgtctttgggagaggaagccaattgagggagagaatgaagatggaaggagatgttaggtgagctaagctttcctttatttcttatgttgaaattctaagacccacgccttatgttgcatggcaagatgagctttcaactctaagaaggagatagttttaggatgcaggcatgtcaacacgcacaggatttcctcaggattagaagaaaagccaaaccaatcaataacttcttcttgcattaaaacagtgaattatttccataaccgagaggaaagtaagccagggtctacaagggaagctgttgattgattccttctccttcattctttggatcgcatgttgtttggggtgaatcgtagtgtagatacctttggcccaccccaacacatttttccccaaatgtaaagatctgctctcccatctcccagaggctgtcttgggcactccttttgcctctcgggctctgatggtcagtgggttcgttgttactgatgagggagtggttagttctctctctctgcctcctccccttctcgccaccctctctgtccaccaggatgtgtggacttggtaccaggaaccttctgatatttcttgatacagaggacaaagcgtggatagttatttgttctttcttccacgggagaaaagtcttaattgattttacatatttctgtgcattatggaaatcacccatcagtcccaagtacttaggggatgttgggggctgcaggaaatggctggtcttgcgtctatctcaggcaaagagattgtggttctccttttatgtttgggaatgcacgacattccccccgcctgccagcccccagtaactactgtatttcaacaataggcttcacgcggctgcagtgtgaggcacaacagtggttttcatgaacttttggctgtggtttaggcctggcagagctggactcttacccttagagttttctggctcgattcattttgcacaaaggaaagtacgataatcggagttgcaggatgataatgtgatcggcatgttagcacattgcaagaaagacagaaatgactttggagtttgcatttcatccttgaaaatgtgcagcgctgcctgagccaaggggcttgtacttagtaggtgcttgctaaatactggaagaaggggtgagggtggcagttgctttgtgcctgagaagaggcaggagaagtatgtgataacctatgcccatacattttggaaatagggatagctattagattttttttttcctgtttaaagatgaagtttgggtcttgacctggtgttggtctctgcctgcctggttgcccagcaggtggtggtaacatggccacaaattcatttgaccttgagttccctgactcttctactccgacggtccctgtctttcactatctcttgccaatgagcagctaagcatttattgagggtccctgtgctcagctctagagggtggggtgtggcccccaacacagaggagcttgctgcccagaggagagggagttttagctggggaggtagaggcacgtgtatttgctgaggtggccgtgaaggggtgcatgtgttgaattttccctacccccaagtcatttttattttcttcctgcaatactgcaagaaaataataaagtttttctaatgtggatgtgtgtgtattatttcatgtctgaaaacagttaatagtacaaaatgatgctcttgagtgagctgaactcaacagaataatttttattcctcaacagaatataacttgagacaatattgacagttaaaaaatgtaagtatggcatatgtgggaatcattcaccaaatttctgtttctcctctctaggccccaatatgtgtgtgtgtgtgtgtgtgtgtgtgtgtgtgtgtgtgtgtatttaaacatgacttcaatgtttttagaaatgtgacatcctaaatatgatcaggtctccagtaacaagacagtgggtggccaatgcccccatgagtggcagactccctagagaaggttttggaagtttgcggaattcttacaagatacacctgccctgaccctccaaactcaactcctgcttccttaggtggggcgcactcctccctctactcctacagggactgaaggctgagagaagcttgtgagggaggttgaggcaggcatgcatagatggaggctgcataggtgtgggaaggagtgctgctcttggagtgaggaggctggttctgatgtctatctgcagtcctcagcctgggtgacattggagagcctcaggccattgcagctgcaggctgctacctgaagggtgggtgtctaagcttctttgtaggtcttaaacagaatgacctagaccagggtgtcaggaatgtacacacagagccctgggggtcttggtagcatgcagattctgattcagcacatctaggggaatgagattctgcatacttaacaggctcccaagagatgctgatgctgctggtccttggaccacactttgagtagcaagagactagagggataattctcaaacttggctatcaattataacaacacagggagcttttaagacccgccaatgtctaggtctgctcccaggccaatcaaatcaggacttgccctacaggaaacagtgtgattggaggcgggggtggggaggttgtctgctggcttgtagccaaggtatgaacggctggggtagtgtcgtggatctccaacttgggcaggtgtcagaattgcgtggagggctttgaaaaaacaacattgggccccaacccacattttcagattcagaaggtcttgggtatcgtccaagaatttgaatttctaacaaatttccaggcaatgctgtttctgcggccccagggactctgctttgagaaccactggtctaatgtaatcccctcccagtggatattcatgaagcagaaacctccagggagtgggagctgggggctccaggacacgcagagccctgcctctggggtcattccgtgcacatctgttttacacagtgagcagccttggaaaactttcacttgaaaaaaatgtgggtagaaaaaaatgtttgaaaacctctgaagcaaaggcaagacttttaatcatgggaatggtgaatgttcattctttaattgaggggcaaagcaggcaggatccttggtccctcttgttgccagatgtggccgtgtttgctcctagtactgccctgtcctgcaggaggtgttttccatgctgaactcctggctccctcttgcatataagagttcacacctgtccagaggcctccatggggcccagaccagtgtcgggcagggcaggttagcttgcggggaaatccaatgtgtgcagctgctagcacctaatgactgtgtactgggcttcaagcaccgtgctcatttatatgcatgatcttatttaattctgtagtgacctcatataataagtactgtcattatcccatttcagagatgagtatttgatgctaccttccagactgacagtgtccaggaaagcagctgcagtggaggtggaagggcagtaggattccctgattggtaagggcagtggaatgtcatggggaagactttgtccttgttggtgtcttgggaagagagcagaacagtgccctgtcagccctgcaggtcccagaacccactacctgggccaggtgacagaactcagagcctttggctgcttcaggagatgtcaccatggctgtctcttcttggtcaaagttccagttggccaagacatcctggggaaaatgggcagggaggttcctcctgggtgaaacccttttgtatggctcttgacagtgcagaggggtctgggaggagattctgtgaactagccggggtgaagggtgggtggatctctccagggctcaggtcctgtttctgtggctgccatctctaaccatggaaggctggcttggacagctctcagcttgctctctacccccagggagcctaaaatgtgtccaaagctgcaggtttttgctgagacatcatgcaaaagctggttcttctccctggtcacctaatgtgcttggggcagaggctgcgagccttctggttggaggaagggaggcacagatgggtgtgtggtcttccaagcagcatctaggtccttctggtggccaggggatggcagcatcctttcgccctcatgggagccaccctctgtcacctgtgtatttccctgggttcccttcatgggacttgggcctcgcctccgtatttacagctgatgttggcagtggagaggggaaggtgagagtaaaacttccagaagaaaagcttcctatgaggtgtttgagatgctccacgatcaggcacgaggccccagccagggaagacccttccagtggccagaacggtgctgcttcccctgtacctaaaacatctccctcctcctccaagagattttcaaaagagtcttgaagctcagtccgactgcagcccaagcatctgcccttcacttccatcttcaacttaaatgagatgcatttaaggaaaggctggcctggaaactactgtgatcagtaccaggcacctttttcctgaagtccttttacatctaaaaaaggttcatatggttcatcaccatataatcccttcgtatgcctggaaatggtacgtgggggaaagtttacatccagtttaacagaatttctacttaagtgctttttttaatggcccacgtttgatcttaagccacttctttttgaacccttgaaggttttattactgaactttaaaaagaacattcaattcagagggctggcatgttcttgaatggagctgcattttgaaagaagggagatgaatttctttccccagcagagacacaggtgtcacctatcaagggtggtcagaactctattttttcctcagtgtagcaccaggatgtagtgactttctctctttgaaggactaggcatgcagatattattgttaggatttgtagaaatgatggccgctcgagtaaacgagtggccaggagctgggggtggaaattctcccacaggtagccctttctcaagactaaatgaacatcccaggcagtgaacctgcctgtattgttatgcatgtgtatagcatgggagcttgggcgccaggcagcaggagccccctggatttgcaccgtgccctttatgagttaaattttccccacaaacttcatgccttttttttttttttctcaagacggagtcccccccccctctgtcgcccaggctggagtgcagtggtgcgatcttggctcactgcagtctctgcctcccaggttcaaaggattctcctgcctcagcctcccgagtagctgaaattataggcgcgtgccaccatgcccggtaatttttgcatttttggtagagatggggtttcatcatattggtcaggctggtctcgaactcctggccttgtgatcagcccgtcttggcctcccaaagttctggggttacaggtgtgagccacctcgcctggcctcatgcccttctttaaggaatcccaccgggtcctctacagtaccctcttccctttagaatagcgggctaattccaggtgcccattagaaattcaagatgtatcaccacatactctgactcaagacccttggttgcaactggaccataggaggtatgcccaggatgtccccctgtggctcacaccccatcaccagctgtgcagaggcaccataccctgtctttgctttgccatacagtgcagaggatgtgcaaccaagaacaggtctcttgatgaccatttgcgtgggagtttcctaatgctggtagcgttggggtcagaatctttacagcatcctgggctgttgaaagatctttgtcaactgcagaagaacggtgtgctgactccttcatcctgtctcacaccaaagaaacttttttggtatctaggagacttgagaccaaggaatacattatagcgatggtttcaggattgctgggagaatctgtttcaggtgtaggttcccattccccatatctgcaggtatgccagtctgggaaggaacctgggaatcttcgtttctcccagtctcctttggcaatgccagtgggcctggaattatagtaacactaaacctaaattttagtgggtggacctcagaaggctggattctggaagcttcttacttacttctcagctgcaagactttgggtcaaacatttttgagctctgttttcttacccgtaagagaaattggccctatatgacttctaagagtccctccaattctgaagttgtagcacattaaaaataatctgcattttaggcctggcaggtcacattccctgccaaagggggggcctgggaaagaaaaagactctacaatgtgaaagtgtgggcttcgtggtatgaggccaagtttataaaggtagcctctgtgaaagaatcatttgtatttattgaaatcactgattttaatcaccttggatgctcccttgataaaaattataatcctctgtaaattatgaataccttgaaattcacaaattctatcacttttgtgattggcaacattaaatggcaacagctcatttaaataagcaacatctggacattattatttttagggatttttcatctgttgatttagaaatctggggcctttatgaatcttgcatgaatattcttttatattcacatctaccatcaagacacaaagggatagccaaaaatattgtccagtgactctttgatgcaatgaatgtgttttttaaacaacaaatccattgtgaatgagagaagatataaaataggctgcctgtgagggtaggtggtgggggtagcttgatccttcaaaagccagaagagtccagcaattcaaagccacagtggggagaaggtttagattttatatataataatataaaattttaagatcacaatatgattttggactgatgatattggaatatggcattcactagttctcagaataatccaatttagaacaatgcattctgagcaggtttggtaaaaatagaagatctatcatcccatggtataagataatgcattaatttttatgagtgagttatgaagatgtacaactcggttaagagttaggataaacataatattccttaattaatccattatgccatggtacacatgtgccatttttattaccttaaaaatgaaatatgtcaaaaaaggaaattgctgcttttttatatcaaaaaagccttttttgaaaaatcataaaatgcctaatctaattcaccatataatactaatgagcttaacaagccatctcgatgcacagtttaggataaaaggtcatcagtttctggcagtcaaattccactacttttcagacgaggcaaaacctttcggcaccaaatattggaaatggcatttgtgattaagcgttattaatagctatttgttatgagcgtgggagagttttagaaattcatattataccctcctcaagttttctaaatcttaccattgcagatgccaagagcaggcatttccccccgtcccaccccggtgaatctgattaacctgttgtccatcccaattctgggtggtgttgaacaggaatcttacattcacacagcgctttccgtttcatgccacatttaatttccccaaatctctctgaatcccctacatttatttcctggggtctctttgctctccaggagccttcctgtcctctgtatttgccactgtcatctgcctggtgtttcttttgtcttgtcacagaaccggccctgtggaggtacagactgggcaccttcggccgcagtgcatgcagtggctgcagccagcctcgttatggaaaagaattgcccagtgggttgagggaatgggcaacagcacactagaatcatgaggctgaaaggaatattgccgactggaggtcatttttcccaactgaggggcaatagtttgccactataaactgcacattgcagtcagtatatgttttattaaaccatttaaggaacttgggagccatttcatttaaacttcctgcgtgaaggaactcagggcagagcccagagcagctcacaaaagaggcctggagtaatttgccgaagaaataccccaggtacccggcaggatgatcgcaacggggggagcctggcgagggctggacccagcgcttatagtactcttcgacgcctgagtgcacaagtgtgtgtgtgtctggaggttcgagtcctagctctgccgctaactagctccatgaccttggtcaaatctcttagcttcccctggactatttctgctgctgcaataggaggggatggggtttgataggagaggctgggtcctttccagctcagtgattccataaaatgctggatcatcagggggttgcccctggaactgtggttctgggacgccccatcaggcccctgatcatcacaacggaaagtcagcttttgtgtctgccctgcctgggaagtgattctggctgtggacgttttcataggctctggggactgaggctcccctgatccagtggtgacgtgcgggttctcagcatagagcagggaaaccggcgacaacttacttctcatattaaacagaaataacctcttcacatgataattttatgtctgaggaaataggaagctgaggtgcgtgcactgtgcctctgagcctcagttattctgtctgcaaaatggggtagcggcgatgcggacgctgttgctttagctgtaaagggcgacagaagggatgccctgggtcccttctgttatcactctgggtaactttgtgattacaatttagctttaacaactcttgcgaattgcatgactgcacattccgtgttcacagtttgtgcctaggaagaaaggaaggatgaggtgagatgtgctttatctttaagagtaatggacagagtgcaatctgcattgtagctttctcagccctaactggtggtccttagtaggtggctttaattctacaaagttatataaccgaatcttttgtctaattggtaactatatttaggaggtagagaaatatgtgagctattcgtttcgattaaattttttattatgcactctgcatttggattgacaactattaatattaaagagcttggccaaattgaaatttgtattgctggagagacttaaatataatgtatgatgctgaaaaaaaaaaagcccagggaaaaggggaattaccaggctgggtgcagagaggtccctgccaggtgccgatgtgggctaggtagaatctgccccacctctgcacactgaggagggaggtgtgtagaggcctctgcaaagccagtgtcaaggtctcaaggattgagatactttcatagagatgatgctaaataaagatgtagagcacgttttagcaacgtatacaaataattttttataatcactgtttgtatataatattttttcccagcactattaagaaggtttgggggtaaggcagagaaagtcgttctaaaataggatgcatggagcactggtgcaatgatgtggaaaagggaggacagcttcctcggaaatcctaacgcagattgtgttgctctgctgcaagtcctcgggagatgggaggctctgtccgtcctgcggcagggagggctcaaggccacagccaggtggggaacgtgctgggagcagattcctgggcatcctgggcctgctgtgggcaggccctgggactcacagccatggttctgcgtctttggggctgactcctttctaactcctagcaatgcctgtggctttgcacagtgacctgggttgtcacatgcagaatcctataggatttgcacgaagacccgggtggtcctcagacaggggaagtcaggtgtctgggtccatgcggccactgaacagcagacacaggacaagaactcagttctagaatgcagtctgtggggcactctcaagagaaagtgtcctctttgggagtctacaatgctacagggccaagggtgagcccacgagcctctggcgtctgtgccctgttagctggtctcacggactccagacacctccaccttccacgcattttctcttgttgggccctctatatagaatgtcagccccatcccaatcctccagataaacccctcaactgcccccagggcctgcaagcagagagcaatcagtatgtcctgaatgggtgcagcagacgcagtgcaccagatttgactggcaagggaggggaagacgaccctttcagactggtggtggccttacgtccttcatccctttttaccccctgctgaactataaactctctggtggcagggacatttttcttgtttttacataatttttcctgacattgggagctagaatatcaatgtaagaaaaccttcatagacaggggtgctcaaagcattggtggttctggctcaatggattttaggcacacacgttttcatctccatttggcattttgaagctcccaggagctcctagatgggtgatgggtttctgaggctcggctggtgtccagggtctcctgggatggggacagagcacaccaccttgtgtctccactgctatacacctgctccatctcccagagatgaccccagcttctggagggcaggcgccttccttgtcaccccaccagttagctcggtggctggtgcatctgtggccatggcaggctctatgtgatggcgagagaggcagggcaagagaggcagtgcgggaggtgcagggcaggggccttggcgctgcctccaggtttctgtgatcagctaggttcctagcttctctggagagcagacagcctggggggttgtttcctgaaagggaatcaggttccctgtttgctttttgacacttttttttttttttgagatggagtcttgctctgttgcccaggctggagtgcagtggtgcaatctctgctcactgcaacctccgcctcccaggttcaagggattctcgtgcctcagcctcccgagcagctgggattacaggtgccggccaccacgcccggctaatttttatatttttagtagagacaaagtttcaccatgtcggccgggctggtctctaagtcctgatccacttgcctcggcctcccaaagtgctgggattacaggcatgagccaccatgcccagccgacacttttttattaggcagggatagcagatactatcggtgccccttggcagccactcaccactcagggtgaggcttcctcacaccagcatccacgactctgcctgggtgtgtccttcgtcactggtgtgtgtctagtctgtcatgggggcaagcacacgtgccagggagttaacacctctggagcacccctcagtcgatggggatggggactggtgggtaggcagcggtctcctctctccctggatggagcagcgtgggggagtcccgctcagggtcttaagagttcccggttggactcaggcctggtgccctcagtgcagtgcactttttagcctgctgtgcacaggcctcctttctttccccacctccccactatcccctggcattttctgggactacctcctgcacaaactttcgcacaaacttcctgcacaaaccgcccgcatttgcatcttcatctcaggccttcctctgagaaaacggcgcagacgaaggccagttcaatggagctcgaaccattggagccgggctcacacacaatctgatggatccttcttaaggccaggtcccttaggctttctcatttgagccttccagaagcctttgatgggagggagctgaagttgttatcccattctcctgcaaggaaagctgaggtccagagactttgcagagctagaatccaacttcctgcccagctcctgccctcctaacttcactgattcaacaagggggagcctgggcctggacctctgcgggggccaaccactgcctgtccccagctaaatgggagggagttagtgagttatgtgacccagagccggctgctctgggggcagttggggccagcaggtgaggtgacctggtagggtccctgagcagtgctttgctcctattaagtccaggaggaaagcggtgaggggagagggctgtggctatgtgctagaaaggatgaaagcctggggctcacagaactgccccacgtggaccactcagcctgcaggctcttagccgctgcaggcaccatctgggggaaatgatggacggtggaccagcccaagttctcatgattgggctggagagaagttctaggggcaaagcatatttgcatcttcctgacagtttgcaaagatgcctctgtcagaggagtgcctgttcttaggaggagactgcttggggcagacatctcttttcccagctcatttgctcctctgaagttctgcagaattaagagcccaagggagtagcccagagaggagtaggagggctgaagcttggaaggcaggaggctgagggttttgctttccattagttccagggcctgaggctgcattttctcttgtctgggccttggttttcccaaatggactggacagtgtgagttccccactgtagttgagtagttgaggaagctcatatagagtttgggctaggggatcacctgccaggagtgagcttgtgcaggggcaagagtgggtgcaagagagaccgtgggaagggaggggagctagtgtcctcgcttgaccctcaacccattcctgactggctcagtttccccaattgtacaaaacaaggaaggaaaatgcacacttcactgtgtatggggaggggtggaaagtattctgttaattgagtcaagtgcttggcaaatggaggtgtgatctgagcggtgagcagctgggtatttaatgttcttaggagaatcagctcaggctgctctgcagtcctggctttaagcccctgagatagccctgagcctcagcccccttcatcactgagaagctgcaggggtggttgtttcagctttgccctggcaccaacattggaggctgagagtgtttcttgggccacagtctcttgccaaggttgggttcagagggtgaccccagatctgggtttggggtttggggtttgggagcccactgttcaacacctgaaggactcttctaggcagaattgggtgggggaccaaggcagggattgggagccatctgccctggcccctggtaggcactggctgggcttcggcaggaggggccagcgtgggtgaggaaaggactgtgccatcaggcgccctgtcctccctcggtccacccgcagtgtagagcctgggccaggcatggagtggatcctcccgacgtatttagtgatttgatctgacagagggtcacatcggtttttttcccccctccaaattttaatatcagattcatttattatgctgactgcaactgacaaatgttcacattattcacccatttattcatttgctcatgaaatctgtgttgagtaattgttttgccttattggcagttttaattctacactcctttttttttcaaaaggtcagtggcttgctagctgaccaggccagtgtgtgcattccctggagagaatttttttttttttttttttgtaaagagatgcttgtttacactggtcagacttcagctttgagtttctctcttcttttgttgccttggatcaataccttggaattcccaggactcagtaaggctcttgtcttatctctctgtcaccctatttcctggctgaatatctgagccatctcaccccacagtcagattattctcttttctctgcttattcatgtcaagctaagatctacagacacaccaatatcaaaatgtatgtgtatgtcttgggtttgtaacacacttacctctaacacgttgatagagctaatgaaagctgtcaagtttgaaatgtctctggatttgcttttggcttttgcctgaaagtacatgagattcaaggggaatatttcacctgcgactttgatttggaaaattgaaaagttggttataagtttgtttgagaaagaaggcgaaaatgttctggaaaatatagttccagtaaagttacttctgagctgaaacattcaaaatgcagagatctatagtctggtatgttattttatggtaactttctgtatgcagctgtgtttgctgtgaaaactcacatttctgtatggaacactgaatgaaatatgaatgtgctttttacaatttagtacttttaataaaagatttgtgagcaaaaagcttaagtgtaagagccacaaaacatatagataaaaatatagccataatcacacatcaaaccctagaaaattcagtatgtaaagaacatcagtaattgagagaagttgagggaaccgacagaaaaaattatatttttatatatatatatctctccagaattctaaaggcatgaatccttttagctgggatcagggcttctgagttctctggagtgggtgttttattacagtggatgctttacttagaaggatgtaatttattatctcgaattcgcatggcaacatgaatttggatttgggtttctgggagaagtttacaattagtcccctcacatatatttataactttgaaaaaacacttgatgttaaaataacttaaatacctccccccccttttttgattgatatgtgaaatattgccttttttaaaaagaaatgaaaaactagtcactgctaaatgaggcgtggccactgtgttcagggggaacggtgattaggtgggcactgttcccagggccagaggacgtgcaaaaaaaaaaaaaaatctgttctgcacctgctttggctttacatgagggatgcttttaatttttctagcttttcattgtttcctcattggaaactcctctcttctaaggagagctctaacagagggtatgaggaagatgtgccttttttttcctctgttcctggtctgccacattcacccaagagtcaccctaaccgttcattctgctgagagccccttctcctgatacgtccctcctgcttcataacattctcagtgggctgtgattgctaccgtttttctttttctattaaaatacagtccgaacttgattatgtgtttcagtatttctcagcctgacccacaagtaaaaccggcgacaatgatttagttattggctcgtgtttattgccaatgcaataaggttgtggtgcctgacattttcttctcactgtgttgaagcttttagcgagttgctcttcttacccagaaagcagcgtaacttggcctctctttgcagatgggttacacattcctttaacactggcatgctcctctaaccttcctgggtggctttcgatgacttaaacacagtaattggcatggaggtctgaagctttattttatgatattaaatcattcttttctggaacagaaatctgcaaagtataccattcattatgctaaggcctgtattaacaagggctctggctgatggctggtgacatcttggagaacttatgtagcacatctcaagggaggtgtcagccctcacctgtggaggtgagcattagaaccaagagcagaatccaggattccatctgctgtgtttcagggacagaagtgtatggtttgtcattgtgagcttggtgcataaagggtaacattaccctaaaaatactcacaatgtggactgagatgaacttgattgctgtggcattattttagggggacttggcgctttctccatgtaatcttgtgaacattttttttttcatgtgaaccatgattttcttgaaacaaagaggattatcagtcataagttctgaagactgaaatggggtgggagaaaggtttagaaggagaagattttttaaaggacttgcaaagctggcactcaactctagctggagagaaattcttgagttgggcgccatcttggttttgttgctccagggcagtgagggaggggatgggagattttcaggtcctcagagtcctcatgtgttccataaaaatgggttcctgtagcccatagacagctactagagggagttaaggcctgctaggaaagccagtgagagttctctaaggctccaagttctaagggttgctcctctccagacagcttgggaactgcaagccactggaagtcactctgtggtcgcacagagctctgcttcgagtccagcagtctgtgttttgtgcggtctcactctaggctatgttcccaagtggagcaccatgatttcctgtgaagggtccatgagatagatctttggtgatgaggccagcttggagaaaatggcgcttgagaatttcttatgatgctattcaatgacagtgtgattcgtggcgtccccccagccctgtcccctgcccaacttaaccacacttggcaagatctctgaggagtcctgagaagaagagtcctcaggcaacagcaagactttcccaccctggtctaggaaaaaagttctggaaaagacaagaagtccatcagacacaaaagaagacatgtaaggggaatcaaaacaaacaaaaaagctatgaaaatgcagagactcaagaggtcgccaagcgaatgaaatgacttaaggagtgatatgtttgcttcatctttctggttgctctctgaatggtctctgataacacattttagctgtagaaatggggaaagggggcaaagacaaagttccgggaaggttgcaagagataactggttatctaactggtatcccgggggccagtgtggactcgcttctatgtctaaaaatgattttgttagtatgtaggtcacattactgtgctgtctggttattggacgttgcctcagataactgtttgtggagtattaaatggttctgctgcctcagcacactttttcactggtatttttcacacagttgtgcggctgaaaaggcgcactgctgcagcaaaaatcaatttatctttccctctgctacttgtgtgctgtgagttcttgtagtgttttaccatttgattaattgatattctttgtgtcggacatcatttgtaacactgctgtccaactttgggtgtcttaaaaactttcgtaagaacacattatttatgtgagacctcctcatgacaaagtacaatagtgagatgcagaaagaaaaattagatcgaaatgctcttggcttataagtttattaagggtggaacaatgtttccattcacgtctccctcctcccttctgcatccctgtcgcagggtgacttcgacggctttgctcgaaaagtttggtgatgaaagtttttccttccttggctttttctgggtggtggtcttttgggattagaggggcttctgattgcctttcagatgagaaaagtgggtggggaggggcagggacaagtgggaagggtaggcgtggcgtggaatgaatgcagaggctgccccatcagagtcctggggttcgagagctgggagcaggagagagctccttctccataggtctctcccagggccttgctagatggttttagtataacgtgtttgcatgcatttcacatggtgctggtctttccgtgggtattattaatatctatttttggagcaaagactgtgtcaaatgaaggtacgccagccccgcgttataaaaacagaacaatactgttgcttccccgtttcattataaagtttctttgaccctgtggtttattttcaaacattcaagttatttgttctggtgtattcttaaacaggggttgtttttctccctttcagaaaatgagcacagatggtgatggattcttcaagtgctgacatccctgcttgagaaaatgttcccaccttctttgtgccgaacaagtcaggcaaactaacatgatgatgcgatcatcggtttcatgcagacatgcagaattgattgacaggggaaaatttaacataaaccacacattctttcagtgccttcaatttcttaatgatgtttatttgttggatattagcagcggcaggaatttcatttaaggcgaaaagtggggagaaaggagaagacggagcaaggggagagaacttgttccaggcaagcaggtttaagaggaaatttactgctctggtagaatctccatcaaaacaatttgtaaccgctcctcggagccagcttggagctgaggctgtcagcggctaaccagccattctcagaccattgcttctgtttgcgtgactaaatacagacaattaacgccgagcactttcttctctatgaactcattgttatccagggttcaagtgctcggataatgggccacagggaccatgggctgtggcggagggctactttgtaaaacccattcctcattatctgatgtgagccctcctgggcgactcagggccccggctcccttgcccgtgggtttttgtaaggttggttcaggagatccatcgttccctgatgagcctggcctgacgcttggatcctgagggagcccttggtccctagggcctggaggtgacaggcgtggggaccttgtacagggcatggagagtgaccactggcgctgctcatgcctccagtgactgcctgcctctagaggggcctctctgtgcttcctggggctgtgtctgtctttcctaatgctctgggcagaggtggagggagatcaggagcccatctgtccctgagctcctgaccatggtggcccttcctactgaggactggttataagggccctgcaccccaaaaaggcaggtgcccttttgccacccctgtgtgcagttcagataaaaaacaatatgaagctgtagcattaagtgtggcgaagtagaagaaagttctgagatttaatattttctcccaaagcatcacattgtttcaaatattttttctcaactttgtggggcctgcactgctctggtgccctaggcaggtgcttagcctgctcactggataatctgcacctcatttactccccatatggtcttcgtgtatttccttttgccatatccataccctcctattatttgtttaatattttcattgaagcagctttacatcaacttctctctctctctctcttcccccacccccactctctcattccccagcctgatacctgcccaacttagttagcctagtcctaatgttgctgtgagatcatgggttgaaggtgctagttatgtttccctgagtcacattaaagtaaatgcaagtggactattaaaattttaaggctaagcgtggtggctcacacctgtattcccagtgctttgggaggccaaggcaggaggatcacttgaggccaggagttcgagaccagcctgggaaacatagtgagacctcatctctacgaaaagttaaaaaaaaattagttgaggtggtgtgcacctgtcagcccagctacttaggaggctgagatggaaggatcacttgagcccgggagttggaggctgcagtgagctctgatcgcaccactgcactttggccagggtgacagagcaagaccctgttgcaagaaaaacattaaattaaattaaatttgaatgagtgagtctcacttcccatcactggtgcccgtgccacggttttggacacctgggtacagtttgcacttgccattttgcaggtggagagaggcggtgcatgagagaagatgagcctttccaggatggcgaggtgcatgtgaccttaactgtggggagaagagaaggtctgtgggcaccccaggatgaacagagggggcggggatggaagggaagagggggacgcgccacaactttcccggagaaagcctgtctcagagagtggaatggtggtcctgcctcctccacttccttctctccaacccttgctggcccgagcgcacagagcttcccatgctcacatttggcttccaaagcaacttccaaaaacaagcttctgggattccttgcgatcttttttctagttaagtcagatcaatggagtttttgctaaagtgattatttttctttttgtattaaactagtttaaaatacaaataaaaatcataaaatttacaaagtattttctgtctttgaaagattcccacagtcacctgcatggggggaccaggtgtccagaacccatctgaaggagggtgtggaccacccccactgctcatggtcagagtggctccctcttgcttagggtgaaggatgtgtgctatgcagttgtataatagggtatggtcttcggactgtgcctcgggcggcctagtgggctgggatgtgcattgcacagagagccaggagcctgggttttcccacgaacgcctctgtgacctcaggcagcctccctcctttgctgggaccgtttcctcttttgcaaaatgggtacagtagcatttgctctggccctttgcagggcagggcctgcttcagtccccagacatcatgatggccacacttcccatacttctctccttcctatcaaagtgaaaggccagggacttccagatcccgctggggtgagcctcagagcagacatgccaggcatcatccctgggtctctgtgatggcttagcgaggtgacaaggccgtggcagacacagagcccggggcactcacaaggatcttgccttagcaggtgacacagtctctgcagcccgaggcttggacagagcctgggctgcccagatagcggggtggaggtttgcttgcaggtagctccctgtccaggcgccttgtacagtgagctttcgggtcaaacctttcctgacacagctggccctgcctgggccttctgctggtgccaaataaccttaagtggtaagaacccctagaaaatctactagtggtggctgacttctgcttaggtcccctgccttgtctcctccccactgtgtcagtcagagcaggttgatctcagcctggccacacacagccctgtttcccaggggtcctggggaagcccacccactccgcactctccacagggagcccattctctgagcaaaaccccaagctctgctacctgccaccccctgcaactctcaccctcaccccatgacctccaaagcctcccagggccagagatccctgtccaaggtggggcttgaaaggactgggcaggagggagagcctcacagcctgctgtccccacactgcccaccccgactgtggtttccagcatccctgagaagcccaggccaagagtggcctctgggggtcctcagttcagtgtggcatcctgagtacaggtgggttccccgttaaggaaaagtggtgtatgaaatttgagtctcccaacctgaaggccttctcatgggaccagaggaagaccctggaagcctgggctccgagaatagatggccctgtccctcgctccgcactatgcggacttcagagtaaagaatagaggttaggccataacacagatgtaaggaagttcatcaaagtcctgctgcctcccatggcaactactccaacgctcctttgggactgtcaactccagctcttattcccaatgtactcagctttgaggtggccctgcatggctggtgtgctaagcaaatgcttgctttgcttattggaggcccctgctgtctcctggggctgcaaattggcagagggctctgctcacctgctgtgcagagaacattagagtgaagggcctgggggccccggggacccctctggggcagggcagcagtcctgagctgcaggtgcaccatggtgtccctgggaatggagtctcgagcggggcggtgcgggctggactatcattcgtgcaggctgtggtgtagacagggctcctgcaggttatgccttctggggccctggttccgagactctgcccctcgtcgagacagctcctttgtgagttagctgcagctctcaggtgcccttggtacctgctgccaggtgccacacatctcgagggtccacttatcaggtctcagctctgctgtcctccacccttgtggctgccctcatagagaaaagagccacaccgtgttcccagagccttgtaggcgcagcaccagctcccaggatctgggaggcagagctcagctgttggactcatgttgtcagggttatctttgcactttgacctaagtagctttccctgtgggcctgtgctctgatcccggctcgctggggaggtcccttctctccctcactccaggggcctgggcaaggtgttgggtaggtggtccagggctcttattggtctgataggaggaatgtgcctgtggcaatgagcaagaggcaggctaaggtgggtgatcgcacccaacccctcccctttctctgggtggagctatttgtttgcttgtctacacaggtggttcctgagctcctgcagggtacccagccccgatcccccacccactggccccactctccctgctggctctctacctgcaggccttggcctaaatggcatgtctcagcgaggcctttgtggcccaccgggtcctcctccccaccacgcctactagtttctcttccatgcttctctccccttggcacttctgcttattcttcttatttcactgttttcttctgtcccagattatcagctccttgagggcaggaatctcatgccttttgttctctgctgtattttcagcacctagaagcttgctcagcacataataggtgctcaacaaatatgcattgatggggagaatgaagaggcatggtccttctcttgtgaagtgtactgtccaatgtgagtcacacttaaggagtaagggatgggtcataacagtttatagggcatagtgaaaggagttattgagagtagggaggcgaaggcttcctggaggaggcagtcagggaagacttcctggaggaggtggcctggaaaattgagtcagagttttatatgcagaggtaagaaaaggaaggaaggatgatggtggggcatgagccacccccctctgggccctctgtagcagggtctggtttgagaaggtcaacaggggcccgataggaaggtcctgagtccagtgaaggatccttgtcttggtactggaggaggaggggcagcctgaagggtttcgtgtttcagtgtagttgatttcactgaattacgaaagttctgtgggttcactattaagattcaaacaacacagatttctgtaacgtgaaatctaaaagacccctttcaactctacttccaaatccttctcccatcgatggagaaaattcctataatgcattttggtttggtaaacagcacctgctggactggtgtatatatacatcatgtgtagggtgaatattcacaaaaagaaaatcatgcatatgtattttacataaaattgacattgaagcctacataatgagatcttactatacatattgtcctgagacttactttttttaaaaaaaacagtattgtttttagatcaaaacatcagatacataggaggtgcacacattttttaacttctgtgtaattctgtgtggtatggcatattcatattcatgtacccatatgttggatatgagggaggtttccattttcttttcgacattacgcttaaaatgctgcagtaaacactgtatcacggtaaacaagtttgggtatttctgtaggatagattcctagaagtagcattgcagaatcagtaggtatatattctaattctttaatagacgccaccaaatttccttccaagtaatgttgtttgtgtacattgtatacatgtctaccaatattgtatgcatagtacttacctgccaaaacctcaccaatactgaatgttattgctcctttaaatgtttgccagtatgaaggaggaaggctggtatcatctacttgtatgtccctcattcagagtacaactagctatcttttcatatctgtattgcccactctaatgacttctataaattgcttgttaatatgttttcctatttttctattttttaaattgattttcaagagctctttacatatgttggacattacccctttgttatacatattttaaacatttttggggggctgctgtagagcaagggaaggacataatcagggaaggcttagaaagactgctcaggatggatagggtaggggagggttggctacaaagacgaggtaccaggcagtagtctgggcatgagagggtgaggcctcatcctgttacattacagagcatttgctttgctcttcattccatgggtgccattccaggtgtgtgctgaagacttttgggaaggtcttcaacaggtggtttctggggccacctgagggctggtacataaagcctacatgatttgcctttcctggcctgtgcaggccgtggaatcccgtgctgagcctggtccaggtgggatgctaagatacccgccctgccgtggcatgtagcataaagccctgtgaagcctggctgtggaccctgaggagcctagggacatggggagggggacacagcttgcaggacagcagagtatgggcactcaggtcaaagcgtgggcttggcaaggcctccctttgctcctgatagagagggggttagccctcattattcttaaggtgcccaaagctctgatagcctgtagttcaataacttaaaattgaaaatgtaggttaaaatactgttataaacacctacagccaccccacagtgaagacagccactacaccttgaacccagccctgtctggggtcctagctcccctctcccagaagacaggtgtaattatgctgtttttccacaagaaactgaggggcagggggcttactgtcttgtctgaggttacccagctgggtcctgtcagagcagggacatattcttagccacccatgatctcaagccaccccccaggcattaggagagccccttgcaggtgcctctgagttcagggcagacacatggtaggtgacatgtctctttaggtcttgcacctacaccctggttttacacctgttcccagatgtggagatggcctggctggaagtccagcggcccgaggagtgggtgcctctgttttctcaccccatccttccaggggtctgtgctccagaaggcgtaggccatgtgcgtttgaacccagccctcacggaggttgctggcaatgtgtcttgggcagaccatttgcgcctggctgctggagcggggctgggcattccttctggagggggagatgagtttcaatgacctctgaccattgtctttggagggtttaccttgtaatggagtgttgagtcaacattcagaattaagagcagaaaggtaacattttaaggcatttcatcaattcttctgagacgcccacacatcttgttttccctcttcaccacttaggcagcaatttcttttcttgtttctaacagctacctatagaaaacacttgaatgcagatcatatcttgatggtatttactaatataaatatttgctttctagaagcaatgttacgcaaaatgcctacgctgcaggctaagcgaccgagtgcttgaggtaagaaatgccacctctgtggactggagttggtgtctagccgtctccacagtggcacgcaggatactggcagaacggccaagtgtcggcacatccggcctgccctttccaaggtccttgtgatcacattttttaaaatgataaaaccatcttggccagtttcccccaggaccccttgagctgatggagccctctcccaacactgcatgaggttcagttgcatatttgcccagaactgtgctgtgcccagaactgtgtatgacagccttcaaggagcttacaatgcatgaagatggggtgatatcaaacctcatatcagttacatttatatttaactggtgtaatatccaagaacaaggaaggaaccgggcaaaccacacgtaggtctgaaaagagccaatgaaatgatgcagaccaaggctagggcgggcagatgcctttgcaatggaattagagtagttttaaatatgggctaatttcaagcaattttaaatatcacaagattccactagagcgaaagactgcagagaggccttggagtttgagaaaacagggtttgctgagcttcagtctttgtatccacctctgactctgtgtgcaggctacagcatggggcattgggctaacaagaggcacattaggtgtgtgtgtgtgcgcatgagtctgtgcatacacgtgtgtttgcatgtgtgtgcatggcgcacatgtgtgcgcttgcatgtatatgtctctcttctcttagggtgaggatctgtagaaaattcactgcaatgtacccgcagccctgggtcgtcgtgtcctgttctctgtgggccagtaagcttctcttctaaggtcagctttcttcacccagggccactccattttcagatagactggatttggagagtgcctttggggcagtttgctcccttcttttatatttgatattattacagtttttgtaacccaaatggcattggttttaacaaataaacaaatgctaactgccaacttctttggctggatggacatgaatcggctttagcaagtgaatagatgacatatcaaagaatatgttgactaatcccttccctgtctgagagcgttttccagatcgtagacaaatacactgcaggcatttaaaatagaagtccgggcatggccacaagtgtattctgggagttacagggtccgcacgctctacgcaggtgagtatttctaggagatgccgggaagttggggacacccggaggcaccctccgatgttcagatgatcgtggcaggaacatgctggaatgatattctgcctttatttattatttgctaccaatgtgactatcttttaatttttttaaaacaaataatttagtcgtaaaggctcagactgatgttttttttttgcgaaatagttctagtgagctaatttatttttcaactttaaaacatcagcattttatagatctgaatttcacaatgtgaggatgattgctacgtacaatttgcaaaattgtgattagccagcccttgctttgagttagttctccctaattcacaaaggcttccaagaatagtctgcacaaaattcagtttgcaaattgcagggcagatttttagagggcagtttaaagaatgaagtcctaagggttttatctatatttatatctcttgttaaaccaaactcttatgtaaatgttacaatctgtaaataactagcagggctgccttcttaaaggcaagattgcatctccatttttgagatttagcaaaattattaaatggcagaattgactaagatgcaagtatatttggaacgagctaataaacattaatcaatatcatcagctgtatttgtgtagctatttcagggtttaaaagtaaaggtttttgttgaatttctcataaattaaaacaattaaaatataaaagtcattacccttagtgatgttttggggaaaaaaatggagatagctttgtgtgctcttactttttatagccattaatgtttcagtaaaccttgcatgactgtatgcaatttagattattttttcatccttttgccattggacaggaaggaaattactggctcccatcagtgttactggcaatccccatgttctgacatctgttcctctctaaacattttaccaaccttgatgaaatgtagtttggtgtcagaagctgacttgaagaaaaaaatcacatgattaaaaaaaacattgattaaacaccagaagtcacttcccaataactgtcaatattttgatggtcactgtcatttatttttttcttaaatcctgataaatcgtatagaaatgttaatcatgtttaatatttgaattaaactgaattaatggcatgtcatttttaaatagaagtgtagtggattcattctagtccattttaatcagggtctttgggctacgattcatcaggaatgttttcagtctttctcagagaaaccatgtaacgcactttctttgagcaaattagacttcctcaattctttgtcctctttatctcctggttttcagggaaaaacacacagcatcttgggggtcaggacctgccagaatgaggaactggggtggagcagaggggcaaggggttctctgggctggatgtccacgcagcccacggagcccccgtcagagagccctctgggaggccttgcagatggaacggtgtggagcgtacgtggtatttgggaagtttgggcccagggaagggtaaaacgctcccctccccgacctggattatccaaacgatttccagatttattttctccgtgaaacgccatttggagctctcctcttcttggctcccgggagaatcagggccttaaattcagtgtgtaagcaggagaaggcccactgtgcgccggacgtgtcacaaaaacagaggcacattccacagaggcatatttcaatccattaacccacagaatacgtattgaatggttagtgtgtgtcatgctttgggagtgcagcgacaaacacacagaaataaccttgtcctcctgcgcctctattccagtgacacagaaaaatgcatctcaccatctccgtcccttgggcgtggggccccctcgcaggctctggctccagggtcaggtgtggtttcaggaaatcagctccagctgtgtgacgctgcaaccccgacctcccagccctctcttctgcaaatccacctgccccaggctcatctccttttctctgcaaactcttctctgaactctgagaaaacttggctctggccctacaactgccctcaccatgctcatagtttaaaatggtagaaaggggccggtgcgatggctcacgcctgtaatcccagcactttaggcggccgaggtgggaggatcacttgaagtcaggagtttgagaccagcctggccatcacgttgaaaccccgtctctactgaaaatatgaaaaattagccaggcatggtgacatgtgcctgtagtcccagctactcaggggactgaggcaggagagtcacttgagcctgggaggtggaggttgcagtgggccgagaccacgccactgcacgccagcctggatgacagagcgagactctgtcttaaaaaaataaataaataaaatgataaaagaaatcttcattcggtaccacaaatttagaaaacagatgcatgggaatcaaagtgcccttaattacccctgttccaacacaaaccagatgctaacctctaggtaaacttccttttcatcttcctcttttttttttttaattagtctacctggctaatttaatttttgttttcttttttcttttttttctttctttcttttttttttttctgagacagagtctcattctgctggccaggccagaatgcagtggtgcaatctcagctcacagcaacctccgcctccaaggttcaatcaattctccgcctcagcttcttgagtaactggaattataggcgtgcaccaccatgcccggctaatttttgtattttcattagagacaaggtttcaccagttggccaggcaggtctcgaactcctgatctcgtgatccgcctgccttggcctcccaaagtgctgggattacaggcgtgagccaccatgtctggcctcatcttcccttgttcatccacatttttccatatatataatcagaaaaattgtaccactagctttcagtcttttcctcaggcatcacgtgatttgtattttgccaaattcccattgagtttgggaccatcatttgtaatagctgccgtttttcattgaatagatgtgccataatttatatcataattcttttattattggctttgagttatttccagtagtttttctatataaaaaaatactatgatgatcatctttgtatgaagaagacaatttttccccctcattttgggtgatttccttaagccagatgcccacaggggaaattcctggctcagaggactccactgtgcttgtccatcctgcttcacaaacccatctctgtttctgcgggacttggtcctgtcgccctaaggactctgcaggcgccttcttgggagggctgcgtgtgttacatgcttgcttctggggtccctttaaatcctgcccccctggccaggcccacaggaagccagcccagtcttcctaaggaaccatccttttcccgaatttcccttcctattccatctcatcaatgctttgtagctgaaacaatgcatgttttggagctcacagtaagtttctggaacttcccattgcccatcacctgggctggccatgaactcttcatgagccctccattcacagccctcctgcccaccgagccccttactctcactcctagtgggggcctcagatggcctgcggtcctgcctcatggagaccactctggcctggcgcttcccacctcatgtgacttcctggattcctcctggaaaggctgggcacctaatgggagagatttgctgaggctcaaagcatgatagttccttaggggaagcacaccatgttggcagaggtactgggtcagatgtcttgccatcccattgactggaagacccagtcctgagaagcaaagccaagaccctggggccctggaggctcccacaccttcctgagcccaggactaagactccatgattttcctaataaaccagatcactccccagggccagggagcttctaaaggggcctcctggccttcccacctgggctgggctttgctggtagaatccaaacctccaatgcctgctgaacgtgaaggcaaactctcggctccactcagctcagtgtggcagaaacgaaatgcctccttttcccctagccctttatcccttcctttcttactttcctgtatcccccacattgactaccctttctcctcgggcacttaacaccagtccagcgacatctcctacctcccgtttgctcctgggtctttcttgaatttttaattcacccacaatcaataattttattcttttaaagaaattacagaatatttctaagtgtatgcagggagaggggaaaagcacagtgtgtgtcagtttagacttgatgtattctggatttagaagtgctgaataattcattcctgtttaaaaaataaacatactatctctatcagaacttgactggggttgcttcatgatgaatcagatccagggctgcagggttcttgggttgggcagcatgggaaagaaggcaggtgctgtctagaggaagccatcctccttctcatggttgggatgtccagatggtctgggccatgattagaggtggcattgctggttcttggagatttcaccttccctttgagagtttctatccctctgctagtgctcagttttgcaacctatccatcctaccattattctactcacttctttctctatttgtcctgctcctctgctcaaccactcctgtcttcccctcagtcaacctgaccatccctctttcccattttctctccctccatccatctgtccatcccttttcacctttatttactcatccactcaatcaactacccccttattcacctgtactcacccatcatcccatccatccatccacccacccatcctccatccatctatccatgtatctacttattcatcatcatccatcatctattcatccatctatcatccatcatcatccatctgtccatccatctacccatgcatcatccatccatccatccacccatccattcatcatcatccattatctattcatccaatctatcatatatccatcatcatctgtctagccatccatccacccatccatccatcccatccatcatccatcaatcatccatcatcaatttttttatccttccacacatccatctatctatccatccattgtgttttgggaatctgcatggtgcaaagttccacactccagagtgtcttccctggtattctttcttttttatttcaggtaggatctcgctctgttgcccaggctggagtgcactggcactatcatggctctctgcagtcttgacctcccaggctcagacagtcctcccacttcagcttccccagtagctgagaccacaggcacatgccgccatgcctggttagttttaattttttaaaatttttttgtagagacggggtctcactacattaatcaggctggtcttgaactcctgggctcaagtaatcctcttaccttggtctcccaaagtgttgggattacaggcatgagccactccgtctgactttccttgtgttctaatgagagattcagacaaggagatcaccaacaatgatacaaggtggccatttttaatttacttcactatgccctcatccctaccccatgaagtcagagccgatctcccctgatatttatatacatcatgtctccttaaaagcccctctcttcttccagtccttcctgaagactgctgagctggctctccctagggcactagtggcgaacaacagtcctgtgtgacaccttctaaaccgtttgttgtacctagggaaaggaggcccagggaagaaagcaccctcacccaaagtcatacaatgggtgtgagtgctcttgttctagaaccatccacgtttgctccttggcctggggagccttgcagagacacctgttctggagtcaggttcatgtcttcctcatgcccagggaggaatgatagccaggctggaaagggctttgtggaggggttggtgtcaagtgcacagacgcccgtctaggtcctccgcactttgccttctgggggctccagcaccaggctgcaactgagggacagaagatggctctagttagaggcgatttgcctgtgactctcacccccacccttggggccagttctccccctcagcctggaagcctcagtggcatgtcggatctgggaggcaaggcagccggtgtggtggctgcaacccagggctgcaagtcagcaggccatcatcaagctgctcccttttggtggtgggcttctctgagcccagtttcttcacatgtaaatggaaaatggggtgctcacatgtgttttgtcagtgtctgggggctgttttggggctccagtgacagcctgtgcatggagagctgtgaaaggctgagggcagcggagagggcccttccctgaggctcaagtctggttcctcagactctgaagtttcttgcatctgtccttttgccacagagcacttaggggtggctgaggggagcacagaaccttagatatgccaagtctggcattgcgcatggtgtccaatctgtggaccatgaccccagtgaaagtgtggccctgacaccaaatcctggcacaaaatcaacccagatgtcactgctgagtacctccagatgtgcccactgttggagcaagctgcaccttggtcacaggcactgggctgcccggctgtgccacctatcctccatgtggctgtgggggtgtcgcctctcctctaactgtgacgggaggggctgcctctctactgtggagcccctcccacacccgcagatgtgcatcacataccttgtctcctctctgctaaatcacaaacagaaattgaacttggggtcatgcatgaagtcatgagtgtaagtttattttctacatgtggagtgttctttatttacagtcaaaatcccctgaagattaaactttaaaaagatttaatagtgctggggtcagatggtaacccttgctgtgctccaggcaagcaggcagaactcagaaatagcaaccactttgaagaggcttggcaaagagggccgtccccattgccagggacatgtcccagtggtcagcccgggcttggcgtcgctctgccaatgctgttgggggaggcctgggatccttgggagtctgccccacggggcgaagaggggaacagtgggctcagaaagtctggcatccagagcagtgcagggagaaaagggtgcgggagacagggtgctaatttggggctgagtgtcctgtcgaagccagagctctttaaacagcaatgtcctctttttgttcgtggtagggaacaagtgtcctccaggcagccggacaagtcactttggctttttctagagaatcctcttaaagttggtcactgacaactttctgaggagagggccaggggatggtgactgcccccgacgcataggtgggtgtggaggaaatgaaaacgtatgtgaagcgcccagcacagtgtgaagctttcagtgtgtgagacggctttcgatgcgggaggcacgaatgtgcctccccatctctggcacaaagaagagaaggatttgctgtacaaatggccctggaaagacacgcgatgatttttttttaactgggagattttttttataaaaagctttttttttttttttttttttttttttgttttctagttgggcgcagtagcccatgcctgtaatcccagtgttttgggaggctgaggcgggaggatcacttgagcccaggagtttgagaccagtctgggcaacatagggagacaccatctctacaaaaaattaaaaagtaaccaggtataatggcacacacctatagtcccagctactcaggcgcggtcttattgatttgggtgttgttgcttcagcccagcaataactggaggctgcagtgagccttgattgcaccactgcactccagtctgggcaacagagaaaaaccctgcctctaaaaataaataagttaattcattaataaaaataaaaagccttttttcccccttatgcaatttaatctcctgtttgcttacagccttttgttaaaggacacagcattgttgaaattaatccaggaggagtgcatatttcctcgggcttggggttcagacctcgggctcagggccccagaatttacaccagctttgaatgactgaggtctgactgaaccctgccccatccagagaggtccatcccatcccggacttcctctgagaatccaggctcttctctgtgaacagttattttatgaggaaagtggggtgttttctaggcctgtgtttgattttcacttataattatctccacataagacttcaattttggattttgaattggagacacatgaacccagctttgcatgttgaaagatcagtgacaaaagtcacatgacatttgcatgccgtaattgttcctgcgaacccttcagcaggctttgtttggaagttctggaaacctgcatgaagcagccatgcacccttcatttgggaggtgtctttcatgcatttagcttgggtttgggtttctgtgttcacatctcagtccttccaagtgaaggaagctctttttcagttcttctcagatcacactcttggatctcctaagaccctggtgttcatccctctcacctctgcggcctgagctgtggaattgttatcctttgggcaatgtctttgtcctctgatgagtggagttaggaacgatgatgacttttaaggttggagaacggggttatattacccagtcagtagaatgagcaggcgggatcagcctgggctcctggagccaccattactagtggggacaggtcagactctgtgcccgtttcctcttctctcagatagggtggaacctgctttgtaaggtgggtgtggatgaaatgaaataattcacatcaaatgcttggcagagggcagaaaccctcgattcacaactctgatgatgatcatgactctcatattggtttatcaatgaacatgtgaacatgaaggtgccttgtgtgtgttcagctctgcagaactccccaggggaggtggggaggcattgcccagctccagtgaccatgatggctgaagaagtgagcagagaaagacttgggcctccaggagctccttgagaaataaaccgagacttcggtggaggccacacttggccacagctacccaagggcaactttgattctcattcgagctcatgtccctatcacagcaaaagctctgcagcccctgacaaggcagaagaggaactcatgggcctctgtgtaacctgctcttggggctctctgctgcccttgatcttcactcagaactccatggttctccatcatggccagaggggaagacttggctcttaataattgcgtattcaataaatggtgatgcattgttctggctgtccacgtagccctaactaatcactcaagttccattggaatcattttgtaatgcaaatagttatttgtaccacttgtgtgtttcagaaatgaaggtctgatgtgatgattccaccctataggagggagagatttgctggacccaatatccacatggctctctctggaaagatcgtggcatgttcatagatgtgaattggggttccttttggattttcctgctgatcttgaagctggcgttgccaggggcttggtgtacttggacctagtttggtggcttttagacattagagaccatcaagaggtacttagaaatattggctgctttcattttgttctcgatttctctctctcacttttctactcctccctttccccctgcaacaatagaattttgcggcatcatcagagtgagagatgggaattagcactgtagagagggataccctcatgcaagggagctctgttgggttttgttcaaacggatcttctttgaggggttgctttgcaaatgtcggtgtgtcaagaaggccaacagctatctaagagaggcctcttagccctcaagagtccctctcgggctctcagtagacaaacacctgtcctaagccacctctgagaacatgggccacacaacagcaagtgaacagaacagagcctttattgagacaggtccgaaaggactggagcaatcagcttacagggaacatttttgcttcgtaggaatgcggtcctgcttgctgaaaacatatcctttgtacagagaacacacataatcctaggtcaactttgccctttgaagaaaaatatgctcagctggaattttggaggtggggggctggggaatgggaggtggggaggaatctattctacagaatatctgttctacagaatatctgcttagagctagaaccttcaaaggagttaagtttttggagttctgttctataaagtgtgtgggatcaaccaatacaatgcaacagccatgaaagtgatgatgaaattttatttaagagaacatctaaattatgtttaaagttcttgttggaactatcttttgcaaagatagttccagaccttggaaagcccaggcgtgatacagacaaaagtttatcaggcccctctccctctctgcacccagctgtactatttggtggtgctatgtgttcttaaggtcatgtcaatatttccattaaaacacacatttttaaaatggagatttattactctgacaggatagtttgctctggggcataagttaacttactgggtctacacttggtggggggatactttctctaccaaatttctgaggaaaaatcagaattgatttgggaattattgtactgtgctacttgattttcaaaaaatatccattgagcagaatggactaaaatattgcaaagtaatatggtttaggtgataatttataatcttatgatttaaatgagatgctgtatttgaaagcacttattttcatgcctggtatacagtaggcattcaataaatactactttggtcctatgattactactatgattactcccgtcaccaccaccaccactactaatttctttgagttgggttaatatggagtaatagatcacatactttattcatcagaaagctgggaggcgccaggtgcccacatgttaaatattaactgtgctaaattcgatcatgtagaagtttgtggccaatagtattatattaaaataaatttggtactgtaagcaacttggacaaaagttgtggaaccgaggcagaaactcactcttgagtggtcagtttcttgcacactgggttatgtgtcactggcattttagggcattttcactttacatctgcctttgtttggtgagaaactttgcagttttctgggctgcagggggcattggagggactgagaggacactcgactttggagctggggatggggaggcctcgttacaagccttgctttgctaccagtggatttagaaaaggttacattgccactctgggcctcaggctcccatttctaggaggtaaagtagtctatggctgtcttactctgacgtttgggctctcccaggccatatctgtgaagcaacagctggtggtctggcttcactgaccctcctgctctcaagacatggccattgtagacatgtactcattcgggatcagaaaggaatggaagcaggtggccagggaacttcgaggcattgaagtggagtccatttttcggtcctgagggctcctagcctgagaaagcttgacctgtgggtcagtgaagcccttgcttgagccagcagagagttaggacctctgattctcaaaacataacttcactgctccgctcacacaattgcagtcaaggaattgaggactagaggtttcagtccctactgcacttccagcaatggactgggaaaatcaggctcaagtcattgatactggtaaataaaagggccttatttcacctgtaatcccagcaatttgggaggtcaaggcaggaggatcgcttgaggccaggagttcaaggtcagtctgggcaacatagcaaaacctcatctctacaaaaaatttaaaaaatttagccaggcatggtggcatacacctggggtctcagctgcttgggaggctgaggcaggaggattgcttgagcccaggagtttgagactgcagtgagctatgatcacaccactgcactccacactccagcctggggaacagagtaagaccctgtatcttaaaaaaaaaaaaaaaaaaaaaaaaaaaaagaatattatttgtctttatgacagatgaccatttcttactagataattactgaatactataaatcttagatctcttctgtctctgcagtggtcatgctgattccccatcagatttgtttgccaagtgacttgaggagatctcttgtaaggaggtcaccaatgtccttgattctggtgtcaccgtctcctgaggtgtgtgttcactccgagtttctgcaggtctgttggccagtgacattgaccaagaatgtcaaggtcatgcatccaacaggctggactttgcttccttgaccttctcagctcagtaacttttcttccacttgaccttagccatccatttcagatccacacccaggcttgacagtgaccaacacctgagctcctctgaaatctggtcttcacccatcctatgatgagtccatcactgcctttccctccaaatcactgtttgtgatgcctccactgtcaatcattggtgtgctcacccagggacccttcagcttcctccctgtcccctgcaggggaccttgtcttcccgctgcccttcacccagtggggagatcatggtccatcattttcatcacttccttgcacccattatcagctcttagctctgtggcatgttttctttttgtctcatgcacctgatgaatcttcagtcccgggtgaactcagatatctcccttttccatgccagttccttgcaccccagctctccaggagaaaaccatgcagctgagctgataggtgtcactcagaatccatggccacgggcatcaaatgggccctcagcatgccatgtgccaactgcatctctcctgggcttgcttttcaaattggccacactggcttttctcctctttgccccccggcctcagctactgatctcatctccattaaaatgcagaagtcttgtaggatcttcctcactctccctccaccaatctgccacttttctggcccttgtcttctcttctctgacctgctcttcccagagatcctcacctctggggccccagtggccccagcctttgtctccttcttggagaggtggttccctgggagcatgcacctggcacccttatgtatgcacccaggcaccctcagtgggcgtccaggcatcctctctgcccatgcgtgtcctcctgctcctccgtcagaactgcccttccctccatcctttgcagctggcttgttctcctctgccaggccctgtctcaaatatcccctcctcagaaagccgttgttccacctccctatataaaatcagacttccccagttgctggctggatctcaccctgcttactcacttcatcataacctgtaattatccaaattatttaactacttcttgtctttcccttcccttgaacttaaagcctatgtgggaaagggccaaacctaccttgctccttgctgtgacctagcacccagtacgatgcctgattcataaaaagcactttataaatttctgctgccctggtgtggtgcctcatgcctgtaatcccagcactttggaaggccaagatgggaggattacttgagcccaggagctctagaccagcttgggcaatatggtgaaacccatgtctctacaaaaaatacaaaaattagtcaggcatggtggcatgcacctgtggtcccagctactcgggaggctgaggcgggaggatagcttgagcccagggggtcgaggctgtagtgagcttcctgcatgccttcctggtagaaatcctagggcagcgtcccattttcgaccttctgccattgcccatggcagatcacgtcactgcactccagcctgcatgatggagtgagaccctgtcttcaacaaataaattaataagtaagtaagtaaataaataaataaataaggaaataatatttgctgaaagagagcacagttccatgaccatgaggccctggtagagggacctcttctgtggccacagtcccagcttcatctctgaaggactgtggatcccagacacagagacgtccgggagttgcaagggagcaccacctgattctgtcctctctgtccctcttgagaagtgtcgcccatgcttctgccatgaggcgagctgggtggagaatgaatgcccacactgaacattcaggtgggttgtggtttctgagagctacgtggccatgaggccgctggtcaagagattcctcctcttcatcttcaccttcctgcctgcggctgtctttgtctggggcttcctgcaggccttcctggtagaaatctgcttgctgctgctggcctgcctgaggcccagggcagtgtcccagtgtctaccttctgccattgcccatcagtagcttccacctggcctgacctcactcacaccttgagccctacctgcaaaaagtgaccttggactgtgacctaggaacacccgtgcaccagccggaccccacggagactaaccaaagacaaaccaccccacaaattagtgggctgtgcctgtgttgacacatctattctcgccctaatgatatgtttatttaactgatgactgctgtcctcattaggggctcattgttgagcccggaatagtgattatttttgctgatattccttttctgcaaagatgatttttttaaaaaatcactcttttggtgtgctatgaatccttaatgaggatagttaaatttaaaagaaacccccaaaccacccttcaggttgaaaatagaagtgtctgcaaaagcaagctgctaatttgctgattattgattgacatgattggtgacagacccaaaactttcaataaaatgaaagctcccatcactggagcatggtagcaaaaagaaacagaagcagtttcgccaatgggaaatgagtgcttggggttctagaacattctctttcctgcatgtagaaagagtcatgattctggaagtttgaatgttggtaatggcctccaaattggacccaaagctatgcgattcttggggatggatggagaaagatgtttgtaaaagcttattagctgaatactcagagtcaattaatgaacttaccaacccctgaaactcatctttctcctttagaattctaatcgaattcctgtgtggcaggtgagtattaacctcctgcttctcagacaaggagagtaagaccccaagaaacagaatcttggctaagattggggctagggttggtattaggacgtctggttaagacaaacgttttctccacccatcgctgggagcccacattttccctccatgacacaatttgaagactggttctacaaatactggcccgttcccctttacttgaatatatccaaatacataaggactgtgatcatgctgtgaggagtatgacacggtgggttgatcatggagatgttattcatgatgaaaattctatggcctcagctcaatgcccagcctttacagcagtttccaaccattttggcaccggggatctgtttcatggaaaacaattttttcatggatggagtggatggatggtttcaggatgaaactgttccacctcagatcgtcaagcattagattctcataaggagcacacaacctagatcccttgcatgcgcagttcacaagggggtctgggctcctgtgagaatctaatggccctgctgatctggcaggagatggggctcaggcgggaatgctcgctcactctctgctcacctcctgctctgcggcccagttcctaacaagacacggactgtcagtggactgagggttgggggcccctgctttaaagatctccgtacagcatctggggctggcggaacagggatggggacacagaggagtcacgcaggaggcagacgtggccagagcatggaggatttggcaccagccaggaaggaacaagcctgagagcctggctgtgtatcgctcccaccctgccacctatgaacagtgtgaccttgggagagccatttaacctctcggaaccttagtttcctcacctctgtaatagggctgttggggcatcaaataaaataaccgtgcatatgagaggctcggttacatctttaatctcgatgatggaagctgctgccactgccaccacagccacccccagcctggtacacatcccatcctgtctcacgagcatgtcatctccttttcccacgtggtctgtgtgttttgggaggcctggcacgcccacccctcttcccagcagagcccagcattgcaccagacacgtgttcagcaggtgctgagctacgcggtgggtgtctggtctcctgaactgacccagtcccggcccctttcccagtgcctggcacatctcctccctggcacatcttagctcctgctctctagggctgtcccttctcttctcagccaacccgggtggagaagctgcgagtgccacttcctccatagctccctgatctgcccttgtgcacggatagaatcttcctcgccagggctgccctcagatcctagccttgaaactatttctacttgttcatgagccacctggactgggtccccttcagctgctgcaactcacagctcaatactgggctgtccaggagccaccaagaaccagcaggtggatgggaggtggtcaaggagtggccctggctcagatgaccatccccactgaatggattcctcctaaatgaatagtaacctcccattcctcagatgtgagaccccaagaagcagcatcttggcaaagactggggtgagggtgtgatatcaggacctcaggttaaattcggttcagttctagagggagagctacaggtaaacaagggaggaggtgaccccgcccaggctggtcagtgcctactgagcgcagactgtatgtcctatgctggtttaggttccagcatgagagtaaggcagaacctgcttgatcacgggggacttgagtccagctggaaagatctattacatatttactggtgtcttcatcattggttccttctagaagttgccctccaggaaggcagaaaccatgtctgatggctcacttttgtttctccagcgcctggcacatagtaggtgctcagtgaacatgtgccgaatgagcggatgaatgaacaggacacctccacgtggaatgcaaatgctgttggacaggacaaggggaaggacagcgcagggcagcacaccatgccttgccagagggattgcataaacaattgctatagaagcttacaggctggcggaggtcccttcaggcttgggctgttgaaggcttattaggagagagtgtgctcaaactgatctttgaatcctggctggcacttggaggcagagaggacagagaaaagcatgcctggaaggtaggtgagatgggccaaggtgtgcaggtaggaccagagagggaaggtgtgtctgggggcaggagggagggtacatgcctggaaagcattggagaacatctcggagaggtcagtacaggccagaatgcataggcccaggctgcagagttcagctgtgacccctgatgttattttaaggtggtggttttttcatattcaattatgaatgaaattgcatttgaggatggcagctgatgatggcgtgtggttatgctgtgtgggctgctttcaaaatagctcaccccaaacttcattagtgattagttcgaggaaagtgcagcctgacccactggcaatttttgtatcatctgggttgggtctcagccgtgagaactcaggaaaaggcagctggtggctttgcaggtctcctgcaacatgggctatctcttgcaggtcttgttcttgggaggcctgttccttcttggtggtggtcagattgttactcctttctgattctcctttaccccggagttagtcactttcctactactcaaacttggatcaccctcaagggagactgatggaaacccctgctgaggctctcagggctaggaaagccaaggctggcactggacgctcccagcccggctgcctggcccacagagtggggttgctgagcagatggctggcgtccgcaatctcccaacttctgctaaatatggtcagtgtttgtagtagctcccaccaccgtctgtgtccgcatgaactgtagattttagcttggccacccctttagtcaggcctttcctggccaccttccctttgccgaacttaggataaaccctcattataatcgagattagccttagtgagaagaacacatgggttggcaacaatgacaaagcccaagcagcctccctgtactttcctgggcaccacaaaccagtgccagtcccgtttcctctatggaaagcccactcctgatactagctgatgagacagctcacagcccatggtgggtccctagatgaggccttccttatctccctcacaggggccagagacatggctattaaatggggatgcttggggttgcttaaggctctgctggtactaactgaccttcagtaaattgcataacctttctgagcctcagtttcctagtgtctgtatagtgaggataaagcgaatagcagaaatgaaatgtaataacgcatggaagttgaagaacttaacacggctctgggctcctagcaagagctcagtaagtgttaactgtactcctcaataagtgatgatggtggtgatgatgatgatgatgacaatggtgatgataatgttgatatgatgataatggtgatcgtgatggtgatgattgtgattatgatgatgatgatgatggtgattgtgatgatgatgatggtggtggattatgatgacagtggtgatgatggtggtgatgatggtgatgataatgatgatatgatgataatggtgatcgtgatggtgattgtgattatgatgatgatgatggtgatgatggtgatgattgtgatgattgtgatgatgatgatagtggtgatgatggtgatggtggtgatgatgttgatggtggtggtgattataacaatgttaatggtgattatgacaatgatgatgataaagatgattgatgatgatggtgatgacaatgataatatgatgatgacaatgataatatgatgatgatgatgacaatgttgatagtaatgatggtggtgatggcgatgatggtgataataatggtggtgatgatggtggtgatgatgacagtaatgatgatgaagatgatttgatgatgatggcgatgacaatgatgatatggtgatgatgatgacaatgatgatagtgatgatgatgatgatgatgatgatgatgatggtgctgctactgctgatgatggtgatagaccttgtggtatagtggctaaaagaatggagccaggtagtctgggactggatcctagtgctatcacttcctggttacttaacctgggagaaactacttgacctccttttgccccagttccctcatatctgcaggggggcaatgctaatagcatttcacagggttgttgtaaggatttgaacttggaccccaccaaggaggggctggcatatggtaagcatgattaacatgctaactagtgagtattagttcttattggttattatatgattgttgtcttattattttagtagctgtgcaatcttgggcatgctagttaacctctttgagcatcagtttccctatggatgaagtggggacacagtgcctgctgcagaaggccattctgttgctggtggcatgtgtgagagtgcagcacctgccagcccaggttgcctgctcttccctccatgtcagcttggtccctcctcttccttccctcccccgggctgtaaagttccgtagctaagtaaccctggctgatgtgtggcttttggcggtggtgcttacgggagagctgcatgtgccgccgcctcctttgggtgacagctgttcctaggcagatgcctcccccatgttctggagcagtgaaaaaaggggagagcgtcccagatttaaatttggaatccgcacggaattgtgccagcctgcctcggagtccacagggcccatgggccaggtgctctttggggtgactgctctctggacactggcatattggtcacatggctgggtctaagttgggtccttgaagccctgagcacagtgggagtcccagaacagcttctagggctgtggagcagccactgaccccacccgaggagcctctcactcatctgctgggtgaggtgcaggtgggaatactgctgggaaaggtgtgcaggcagcaggagtgagcaagtgagcaagagtgggaccattgatgcccttggtctcagggtgtggcacacacagggcttgcctaccctcgggcagagctctgcccactgctgtgccagccttccagggatctaggatggtccctgggctgggatgggtttcccagatggacacctccacctcgagggtgagggttgccctctgggggctggaggttggtgacattgccaaatctctgcaccatagggagacaagaggggctgctacagccctggagtgtggaggaaaggttggagagggaggtggggaggccagcagccacgttctgagcaggcaggtgctgtggctgcgtggttgctgtcgacttggaggctgccttcttctggaagcagggtgggctcctctggaatctccagccctaaatgttctccttctgccccagatatctgtgtttgcctctggcctgggggtatcctgcaagggtgagctgggtggaccctcctcaaggaggaccagtgggcactcttcatcctagggaaggcaggtggactccccatgaatcctgtcctgggcccgggcaggccgccatcccctgcaccccctcttcccgcccgtcccagctccaggagtgtctgctgtctaagggacagtggtggggacagggtaacaggtcaaacctggtctcgtgggctgacttgcagagtctccctagctctgaggtgtcagagatggccttaaccccaatggccatgtctctgggggaacaccggccaggtagcctgcacaagaagcccaaatccaatggtcacactggctgtcattcctcagaggtggtttcaggggacaagatgatgggtgtcagcaggacccttaggaaatgtcagtcagtcgggtcccggaggggagaccgcactgggcccagcccagcccctggactccccctacagtgctccctgctttgggtgtcaatatcccctaagaacagggcttggactcgatgcataatccattttaatctctccccttcttacttgactttttatatatatctcagaggcaaacattcctagtgaagggttgttttcttcttgcaccttggaggggtcttttcatctgctcaggcaccttcgcatccccgtggatcagggctcagagcagaggagagtcagcagtctctaaattatcatcatctcctacctgcacatgtacacaaaaataagcctgaatgctttttcttagtatgcaatttgctgtctatttttaacttgtacacagagggccaaaaagaaaattccatgaggacatgagagtgcattgaggttgcaggtatacagtcaccaaagaacctgaaataattgccggaatgatatcctctaaaagatgtgagcctctcagagagagagagagagggttcctcttgcaacaggcatcgtgtgtgtgttttatgtcccttctcttctgctgctgtgcacttaattcggttccagccgtgtcagggagactcgagaaaaaaatcccaccattaaagacatgctctttgttttttcaatctgtgaccccagcaatctctttagcaagccatggttcagtgaactggcacacagcagccgttcggcagtggaaaaaatcataaaacagatggaagctttacatttttgtttagtttttaagagcagtttttataacatcgcttaagaccattctgatgcatcatactgtttacactcaaagctttgtagctaagatgtttacagtatggagaatgttttaagatattttatagttttgatatttagataattggcaaggaaaaaaatagtttgttgagattgcagtgatgttgggaaccgtgaagtaacttatgagtctcaataaatatgtccagttcggtggaaagtacaaactcagttaaaacaaaacaacacaagagggaatatctttttagtgaaatcatttccttttcttaatcaaaagatgacaggcagggccttagaacttccatctgtgccacaccacaccacactctgtgcctgctgcttctcctctcgtgattgatagctgcaccccattggtcccttgctattctgcatgagttcatgcagacaccaaagttaataaagttcagttttaggagaccaccttgaaataaacccagggcagcccccctcatctctttgtgcagtagaacttgcagagatttttttttcaatgtcaaagaatttatgcagagctgggatttggaactctttttttttttaactgccccaaaatggcattaatcaaaaacaataactccttttaacttttctaagtgctctaaaggaaagtatgaaataatctgtgtgtgggccacaaatgtggagaatgcaaacatttcacaataaacatgttgaaatgaaagtccctggcaagatagtctgaaagatagtacatgctgggttaattaatgcatactcataaaaataaacctcacttttaagatttgaccaataaaaatcattagcatatttggatcagatgactttatgtatacattgaacttctccatgcaaattgtccttggaaaagcctggaaacagatttcagtttaaagtcaaaactcctcttctgtcttctctttgtgtttccagtacagtgatatgatgatttattctggtttcatctgttatacctgcaattgatctactggtgatgggattaaatttatcattttagatgtataagtcatagttagatagccagaaaaatgtttagttgcataaaaattcccattgtttgctttcgacacacagtgtttgatttttgccgtagtcaaattgctgtagtgcattatttttactccaagatgtttatttatttatatatttatttattttgctatcttaaatggaatcattttggcccattcacaactgctatctttaaaaagatattttcttgagatcatgtattcaaacaaatgtggacttggggttgtggactctgctatgtgctgaggttctgctgaattagacatcacataattttctaagtctaattacagtatggaagattccagttttatgttacgctttttgtacaggaaaagacaaactgctacaaagacctcttcagtatgaagctaacagtaaaaccaaactcattttaaaagaactgaaattgaaattcataaactcagtggaagttaagttgtaactacccagcctgggaaattctgaacctaagataatgctgcattttgaatccttatgaaaataaaaacaacccaacaacaattattgaggaaaaaaactctagcatgagtttaattttatccaactttattggcagcttattttgaactaatgtgcaataaagttgccaagcacagcaattgaaagaagtaagaaaaaaacatttttggttgttttcttacactggtttgttctaataaaggcggtagagaggtcaacacctgaacagataatttgggtgtctgtctcaatcatgcctggcttagtgctttaggtcttatcagtgctgtcattagccacttccactaaaggccaggtgatggtctggctgctgcagggtgttccagggtctgcagtctctgggtctcttgtctcccccaccctcggcccggtggggacagccttgggcccctggataagcccttctatggtagcatcctccaagcttgcctgggaacaggacaagtaccccttcctaagaaagaggctttcacatgaatgtttctggaaaaagggcttgcaagtttgagggttccagcagattataaacagtgtcggcttcataccctcattttgtgccagagactcaacattgcctattttagagactgtgtgtttacgcctccaaaacaaacctctgcatgtgtgtatatttgtccaaaagccacacctagtgattcctggggtgggggagcatctcttcataatatgtatcacaagtgctacttactgatgttagcaagcttctcagctccctgctccatctccagttgaggggccttgacctgggtgaggctccgacttaagggaaacctagaaaaatcctgtgcccaggtggagatgaaggggaggaagaggtgttccagggctactaactggtagtccctggagaaccctatgacatccacgcagtgaaattaaaagctgaagatgtatatagcatgtgcgtgattttcatcatacagaagtcccatagtttccacctgatttttgagggcgttcctttcttgtctgtagctgagaaacagataaacttttgcaagtggacctttcgatgcgaaacactaggagatggtaacctatgcctggataaactgggtgctgcttcaggacaaagatacacatttctgcccctgaagaagtctcacccacagaatgctgggttggatggagggaaaacagcaagaggttggccaactctgagtgcatcctgaaagcgtccctgtttcagtccttaaaaaaaaacttatttcagtcctttttaaggtaatagcttggtgtaacagtcaagatggccatgcgaaagtgtcagagggagcaagccatggcctgtggtgagacccagggaaggtagttgaaggggcccctgtcagaaccccaccatggggtgctgggtttcaggggcacccctgttttggccctgtggtttcccacccctagggcctgcccccagttggcagacaaggacagccagtggcccacacctataatcccagcaactttgggagggtgaggcaggtggatcacctgaggtcaggagttcgcgaccagcctggccaacatggtgaaaccctgtctctactaaaaatacacacacacacacaaatatattggcggcctcctataatcccagctactcgggaggctgagacaggaaaatcacttgaacccgggaggcggaggttgtagagagcagagatcacaccattgcattccagcctgggcaacaagagtgaaactccatctcaaaaaaaaaaaaaaaaaaaaagacaaggatgctgtcacccatatctcagactccatacttgggacatgatgcatccgtcaccttcattcccttctccgagtcagcactggatcttgtgccttgggaattatcagctcttgggtctcccctgtccaacgctgggcctggcctgccacaccttaaaagccctcactgagcgagtccctcgcttgggctggagcagagcaggcaggccatttttttttaaaggctgggcccatggtggcctcggggattcaggttccccatgggcagaaggctctttggagacccctgcattcatcccctcatttcacagttgggaaagtcaaggctagggaagagaagggactcccaaggtcagacagcgagacagtgacttagtgaccagacccaggctcctagttcttggccctgtgatcttgtcactacgtgatactgcttgtctagtgaatggcacatgagtcagccttctgtgggagacacagattggatgctactttctgtaagatttctgcctcctgctggcttatcttttaatatagcatcaacaacagcaacagcaacacaatagcagctactaactcggtaccaggcatattatttttctaaattaattaatactaattcatgatctcctttagtttaattcgttcttgcaacaaccttacgtggtaggtactaccatcatccctattttgcagatgaggaaactggggccggagaggttgtcagatgccccaggtccacagtcagtagtgggggaggaccacgccccgggggctccccccagcatgagtgcactcagctcctttctctgttcctgtccccagccctgtgagaagactccaggtttgacagagctgagcattttcctctttgaaccagctatgtctctgttttatgtacatagatgggcaagaagtactggcttttatttatggcactgggatataaaatttccactggacacacattgatttaaggaaatctgtggtcagtttcaagaagtgtcttcaccagtttatggtaaaggtataagcagatgtggtaatagcatgaaggtggcaggcaacgtggttggaatttggtcagcactgtcccatgtctacttaaggtagaagaaaagaaaaaaatgtagtgactccacttttagaaatttcaaatgagtccttatctgccttctgggagagagaagccccagtgacatcttatgaccaggtcattgaaggcagagagtctcggatgcttagttttcctacatgcatctaagggagccatgctcgacccaccagcgggagccacagatccatgaagtctgcagtcttcatccagtgtcatcccggggactaggtcggcctacctgaaaggggactggcctctggcttggaatcagtggcagagctggaggcagaaggaaggaggaggtggcaaattgggaccgggaggcatcagtcgggagggctggagagtgtctcattcaaactcccgtgtacagcacttgtgctttgttgcctagtgtgaccaggttgatgactgtagctggcatgcaccccagatgactaccagacattcaggataagtcttccatgccactatgatgctgccacagtgttacagattcactgccatcggaaaggctgtaggacagtggttctcaaactggcttccaagggaccccaagggtttccaaggagacaccttgggagccaggagaagggaagggctcagggttcttctccgcagctatgggcaaagcaactgtgctattatcagctcatatgggagaagatttcctcgggaaaaggattctgctactaggaaacgctgacaaatcatatatttagaccaaattttattctttttctaaaattttatttatttataacttttgttttaagttcaggggtacctgtgcaggtttgttacataggtaaacttgtgttctggaagtttgttgtatagattagttgtcacccaggtatttaggttactacccattagatgtttttcctgatcctctccctcctcccaccctccaccctctgagaggccccagtgtgttttgttcccctctctgtgtccatgtgttctcatcatttagttcccacttataagtgagtgagaacatgcagtatttggttttctattcctgtgtgagtttgctaaggataatggcttccagctccatccttattccttcaaaggacatgatcttgttcttttttatggctgcatagtattccatggtgtgtatgtaccacattttctttatccagtgtaccattgatgagcatttaggttgattccatgagtttgctattgtaaataatgctgcaatgaacatacgcatacatgtctctctttataacagaacaatttatgttcctttgggtatatacccagtaatgggattgctaggtcaaatggtatttctgtttttaggtctttgaggaatcaacacagtcttccacaatggtggaagtagtttacacttccaccagcagtgtgtaagcattcctttttctccacaacctagccagcatctgttattttttgacgttttaatagccattctgattggtgtgagatggtatttcactgtggttttgatttgcatttctctaatgatcagcgatgttgaagggctttttttttttttatatgattcttggccgcatgtatgccttcttttgaaaagttagaccaaattcttgattctgcagatgggaaaccaaattcctcagaagatcaaaggattacaaagatcaactctgtacagtcatttaaaatagagaatgtctttattcaagcatatcggtggagctttggtagaagaaataaaacatactctgaaaggtgacacgagggttcctctggtctagccgcctgctttttgggcagcctggcagctagaacatttgatagaggtggatatctgcctgggaccaagctttccgccacagggggcccagagcctgcaagacagaactgctcatcgtatccacccatgatggctggaagttgagtatttatggggtgccagggccatgagccaagctctttcatttatgatctccattctacagatgaagaaatggaggctcggggtcaggatgtgacttatcagcaggagcctactgggctctggtccagggtctgtgctctcagccactgcggcccctgctcccgggaagaatgtcttggtgtctagtaggattgcactgaggtatacagggccaggggtctcattgtcagaaacacccagaacgaatcctcccctcttgaagattcagacagaagaaataggaatattcctatctcccctttcctgacactgcaagggtttttgcaaaatgctcctagctgccccacagggtttctagaagtctgtgtgctttgaaacattggaggggagacaaagatgggtgaccaaacccctaaacagcaaacaggcaggggccctacttaggatgtcttctcctatgtcttacttcaacccgccacgtgggcatgctggagacgcccatgtgtgtacttgttgatgacaagattccaatgatgttctttcatccattcatgaagtatttttgatttacatgtgtttatgcatttacccattaattcatgcatttattactttttacattccttcaatcatctttctatttctccatccatccatttatacatgcccttatgcattcattcacctcttcatacatttgttcatgtatgcatttgttagttccttccttcattcaacaaataaaacacgaagaaatgaattaaagcttctggaggaatctgtaatggtttaactgcacccagggtagattctgggcatctttcatatgattggatgcagaggctcactaagttgaataaacagtgtcagggtacctaagaggcatttttttgtggcctgggagaggtgcaggctaaactcatccaccgtgactgtagaattcaaatgtcccttacgtgctgaggtccttgagcctccctctctactttttctccatggactgataatttgtgggcacccctgtgggtcccctcaacaagtcttcctgtgaccctgggacatccttgggttgctcctgagtcctgaggactggcagaatcctccatggggatgcaatggatggttgagtccaagatccagggctgggacatgaaagggcaaggagaggttatctgtcttgagtctcatgagggatgcacacagagcagggcaggagctgcagtggagggcatggaggcaatacaaaagtaccaagtgccatgcagaccaaggtttccttctcttctttcaccaaagagtttccatccattttctttttttttcttttctttttttttttttattttcacgtgatccctgagaggccagcagaatgaatgccagtgcacctgtttcacaggttgagaacccatatttgaaagcacaaatgattgtgtatgaatcaaacacaatccaaagataaggtagaattcctggcaatcgtaataatcttgagtgcaagccaggctaagaatgacacaaagggaagggccttctgcctccaccaaatgagtgaggatgaaacatactgtgtcttctgcctcaagtgctgagttggtgccctggagctaggttgattgttaagatggcttcagtccagacttcttttggtttagtgagatgatattttgttttcacactcaactttacttactgcatagggctccaaatgcatctatgtgccctttctgctttgcagacagtgttccaagtatctggctgcaaagattgggtaagtagagcattcataatggctttcacacatgcaggctggcctggggcacctgttggttccagatgtttatggccttgaccccggtgtgaatgtcatccctccctgcagtgaaggccgaatgagtggtcaggtggaaaatgttcctgccttccttatactggagttaacttccaaggtacagtccttccccatgcattcagaaagccccactccaagaagccaagctcaggtgtcctgtttcacctatgcctcggagtcccacccacattgaacctcaactcatggccaatgagaagcgttcttgctacacactggttccctaggtaaccgagtgtacactcgagaagaactatagagaaaggaagaagtggtaccccacaccctcctctccttggggtctgtgctttatccacctcagccctcgaccctgccctcaccaactagccatctttttgcctgttactctgcttgatttaagatacacagccataaacactcagggcagccagcagcatggccggatataatattaatttcttttctggtttatttgtgaaggagtcaaccatgtaaatcactttaagtcactaagacagaaagtgatatcgcatcttcaaatggagaagtatagtatgttaccattaaaatctaagtagaatatgtgattcaactgaggttgttaatgtgggtatacttttgttaaccttactttcgattgtgtgagatgctccgaaagttgttttttttttctattcattttagtgcaaaccaatggatacctatctgaggtatatcattagaaagtctggtgtctgccggacaatctccttgcaatgccatttttcatgacttgtttaattaacaaccatttttgacctagacttgttataaaagtgttgctattctctcctgctaaattatgtctaatgaacatatttgcatgttatcagatacagcaatatatcatttcaaatttcggcgtttaagcctgcatcactcaaaacagcttttgtggattagtaagcaggtgaaatcaaaaatctcatttcatatctgacattaataactttcagggggaatgagcattggcatttatgtctggaccagaatcgagtccaatgtcctagaaacacaagggcagcagacaaacctactcaccagataggaaaataaatcatgcataatgcagaatttctaccttacatgttaattaatgtgtgcaatcaattactgatgttacaatatgagaaagaaactggtggggaatggggtaataaaaaatacctatagatttatctgcttcttttttctatttaaacaaatagtcttcaagcctgtgaatgctgtgttgagacatgctctgaataataagcatcataaaatctaatcagatttataagaggaattgattgttgtggcaggaggagagggtggaaaataagctgaaatttaagtgttaatttttatgctaatccacagtggcttcatatgaagcaattttgttctgtgccacaaatataaaattgtcccttgcagagaaatgtcagcttgctagacctgaaagcagtaatttattaggtatgtttctattagtatgtgtcacagttgttagcaggctatacacacaatggtgcttcatacttatcctccaagtctcagaatgtttcagctcagtggctggaacgtggggcattaatacattatcatatgcggggtggtctgtgccctgtggacaaaaggctatttaatacaatttaatgtcattctgagaagaagtggaaaaataaagacggggaataaaatggcatctgtgtgtttcactgtgcactcatgcacaaaccctcagtttaagaggtatgacatttctgccaagaaaaagaataaaactggggcattttttttataacctgttccccactgcagtattttctaaatgctattaagtgatcgatttacacggccacatgatgatgtcatctataagaaggggaatgcagatgacagcaaaatactagtgacagtgaccttgtttcagaatccttggaaccctgtcagctttgcttccagtatatggtttcaaagaatgcactttttggacaatatctagttactgggtagtgaattaatagagttaagggttctgatgcaattcacatataggtcaattacatgcgccaacatctgctctgtcactatcatttgcatatagcattcatatgttaatgatgcctctttttactcaagtaatatatttaaaaaacaagatttgcatatcagtttggatcagtatattacaagcaatttatcattttctccttcttgttatgattttaagaacaatatcttgagtgatggctgctatatttgagcacggctctgatttatacaagaaacccctcagtgggaaagcttccattctaaagctgcttaaagccttataaatcaataatgacacagatggactggtgataatctatttagaatgcctgatagcaaatattgttgtacagatgattagagtggtaactgttttagcagaaagcctgtcctctcttggtaaatggtaagtttgaacaaaaaagtgctcgcacatggacttcatgttaggaaatcttcttgctgggtctggattgcaaaggggaaaacatgggggagaagaacaaagggacttcccgctcctgccaatataatcatatcaatccctgtttctttaacaaaacaggacctcttaatggaattgtgtcttcaggtgtaaatagcattaaaagctgcttctcctctcctctttgccctgatagagcacaaggagtgagaaaataaagtggaggttgtcagaagtggcagctgcttggaatcctgataaatataagcttttattgatctgatgaaaatgaaagatcccagtgctaggcagtatttagcttcttgtctacagcacgtcaccggtggccttgcatggggatagatttccattctcatacaccggatttgatttcatctttaaccttttccgttgaatttccttgacctctgcatattgctgtgatttggtgaatttgttacatttcactttacatcatttctttctatatttccttttgtgatagggaacggggacgccccctcttgcaatctgtcagtgcctgcaccaactttatcctttctggggcattttctcaccagactgacagtccttaagacaagtatgcagttaagctgctaaggtaagtcttacgatattagaactccttcttcttcccagacatacctcatttccttctgccttgttgcgttgaccaaacacaaatctaaaccaaatagctcctctgtctcctgcccccggccaggggcttccttgtaccctctccccaacccagataggagtcccgtacctgcccagtaagctctcggtgagtggtggctggcagggcctttccccatgggggaggtattcctttgtggtttgggtgtgtttggggatgggtggggaagaggcacaaagagatcgtgaaaaaatgttattttctcctctgtggcttaaggcctttctgaagttttcttctgagataaagatggggcttcattgcaaaatcctgaggtgctgctaacatattctggttccaagaaagtgctgctgttattttgagtagttttgatacaaccaaatcaaagtgaagatttgaaatagcttttctgaaagcccaagctgaagtcataaattattctgcaccatgattcattctgatagtaaaaccatacttctttgcctgacatcgctgaaatgtggaaaagtgaaagttaaaaataaaatgaaacatttaaatcttggctgttgagaacctcaggtagacatcaaggccagtcgataaaagcctctatcaattaggcttccacggttatcatcagatattggtttattagcaattgcacaggtgccgggttccggtattaagaatcggaagggataagaaaaattcagggaagtaccataaattgagaagcaagggtctggggctccgaggtgcacttgaaggcagagcacgagacagtggtggtgctacggcctcgtgtaatatcgtaggagaaaaatatctgcagcgtaagagtgggaagttttcctttttttaccccctttatttgagttagaaagtgttgatttcacactgtggtgagtgttttccgtcagtttcttggtgggtgtatttcgtgttaagaaaaaggaacagcgaacaccagcagtggtcgcttccatcagtggatgagcagcccccccctggcaccggtgacttctcagagcactgggtctcccctaggcatggtgacaacccacaggcttccgggccccgggcttccagactgagctgtttggctagttccttccacagcatatcgccggcaggagcaatttttggttccatagctgtttggttgggaaaacaagcctgcagttgccagtaaggtttagaatctgcctgccagataagggaatgtctgcgaagactattttccctcttgggaggcaaaacacagatggaggagttaggagccttacaatatttagctgctacattgatggtgaggattctgccacgcggatgctcacagttttggaaggcccagtttagcatccatgcctcaggcctcaggtaggggagaagggtaagactggcttcctccgggggcagtgagtacatcagtttgttctggaacattccactctgcttgcctcccgagatggagaaggtgctgaaagctgccatttcccctgatcccaatcgggatgggtagggaagagaaggatgaactacctgcccaggtgcctgacagggtggagaccgagggggaggaggagaagggacatgtgtgtcctctgggaatgagacacagatatcctttggatgggcttcttggactctgtagaataaacagtagctccagcctcatcagattctctgacacagagagcgggaggaggagaagggacatgtgtgtcctctgggaatgagacacagatatcctttggatgggcttcttggactctgtagaatagacagtagctccagcctcatcagattccctgacacagagggatgcattttattttattgatgtatttattttcgtagagatggggtcttgctctgtcacccaggctggagggcagtggtgcagtcatggctcactgcagccttgacctcctgggctcaagcaatcctccctccttggcgtcccaacgtattggaattacaggcgtgatctactacacctgatcatggcatgcattttaaaaaattaactgccctggcatgctgtgggcctcctagaagataaagaacaattacgtgttctgtgggattggccacataaaggtagggagattttcccagactggaaatatacatcctggaataatttctgggtcacatgaactggaaggaggattgagactttgtatccaaaaataaattttgtcccctggagaccaagaaagggggcaggtattagaaacaggcagagaacatgtgagcaccatcctccctgcccctcgctgactttcaggctctagaccacaggcttcttgggccctgaagttgaatcctgccccaggtagtctggaccttggatgagctggttaagaatgggttggaagtaggctaattcagccccagagccttttctggactttcagagtttcctgctgggactcttggtgcttctcttcatcaatgccctcccgattctttgcactagacacttgtccttttggagtcttatgtattaggccctgtttttgatgctgtaaagaaatacccaaggctgggtgatttataaagaaagcaggtgtatttggctcatggttcttccggctgtacaagcatggcgccagcatctgctcagcttctgcaactgcatgatggtgatgcatcatggagcttttactcacggtggaaggtgaaggagaagcaggagcatcacagggtgagagaggcggcgagggaaggggtgggggaggtcccagactcttttaaacaaccagatcttgtgtgaaccaactgagtgagaactcactcatcaccaatgggatggtgttaaaccactcacgaggcagggtctcgttgttttattttattttactttttcatttggagacagggtctcactgtgtcactcagttggagtgcagtggcgtgattttggctcactgcaacctcgacctcctgggctcatgcgatccccgtgccttagcctcccaagtaactaggactacaagtgcctcccaccgtgcctcgctaatttttgtattttttttgtatagatgtggttttgccatttttcccaggctggtcttgaactcctgggcttaaaccaggggtccccagcctctgggccatgggctggtactgtctgtggcctgttggtaattgggctgtcaagcaggagctgagctgcaggtgattgagtgttactgcctgagctccacctcctgtcagtggctgcattagattttcataggatcccaggccctattgtgaactgcgaatgtgagggatctaggttgcgtgctccttatgagaatctaatgcctgatgatctaaagtggcacagtttcacccgaaactctcaccgcctcccaatccatggaaaagttgtcttccacaaaactggtccctgatgccaaaaagcctgcggacagctggcttaagcatctacctgcctctgcctcccaaagtgcagagattacacatgtaagccactgtgcctggcccagagtgccactcttaagcactgattacataaacattgaggcaaccgttggtaactaaataaatcacacacatcagacaatgatttcatgtcccaccacaatgtagatttccagagagctctttgcaaagattggaggcagaatttcagggcatggttgtccagccttctatagctttatcctttagaaagacctcatgttcaggttgggaggcccagtgacttccagaaggaaaggcactcagagcctatagaaccctccttttatgtaacagacaaactgtgtcccaggcacttgcaggactctggggaccctgggcagtctgcacttcaggtgctgatcctgcggtgggctgggctgtcccgagtcagcccctccgtcctggtacagatgagtgagtcaacatccttcctgcagcagtaattaccttagttaaatgctgcaggagtggtactttgggagcacagaggagggagtgaataattgtaatttctatgtgataatgatgataagccatgcacatgtctatggggctttgcatcatattcgatcttcaccatgagatctctgggcttttggaagaaaagatcccagcaaactcctttgtagctgctgaatgagatcggtgtgtaaggtcccacggtggacactttcccagggagaaaaccaaaatcagagataattttaactctagagagaagatagagtggagctcattctcgcatgtgcatttcttgatatcatctcaattaatcctcccaaatcccctagcaggtagtagatagtatgattcattccattttccagatgtgggatctgaggccagagaagtggcctgccccaaacctgggagggccaggtctgagcatagctcttcctgacctcagagcctgatcccttcttcctgcctcaaacctggtggttcgagcatggttcttcccaattttagagcctgaactcttagctcttgcactgggcacaatgttggacaagacagacaagggccctgtcctcagaggactgataatatgggcgttgagggtggggagcagtaaacaaggaaaccagtggatatgatgacatcacagagcaataaatgcataagaaaatgaagcaggagaatgggtggggaaggacaggggtagtatctgtacttgagagagggtaggtggtcaggggaggcccccctaaggaagggacgctggtagctagaggtctggaggacatggaggggccagagcagggtgaagttctgggaagagcattggagcagaaagaacagcatgtgcaaaggcctcatggcggggaagagcgtggcatgtctaagggacagcgtgtaggccagcgtggccagacagtgatccctggggagaggatgggtggggtggagggcctttatcaggcgtggctttgtaggccatgctgatgagtgtgaactttcatgtttaaccagagggagtgtcttgagaaacccttttcgggtgcggagatgctcctaggtgccaggaatgagtggcttggattggctcttggtggccttcgttttcctctggagggatgagctggtgatttgtccaaagctgggaattagggatttcaggctcttcggtgcaagaaagatggacagcagcactggggatcctgctcttgaagcagcagggcccggtagctcctcaggccctggcatgagctttctgtgcagccccgggaggcctgagcctcccagctgtgggcgcctggggagagtgacaggcagagggcttctggaaggtatcacaggccgcttaacttctctcacctcaggtcccacatcagcccacagagtccagctgtgctgccctgcccaactattgctcacctcttccttgtacagactctgcttcttcctttgatcagggaggcttggtttggctaagtctgtgcccagaagagaagagtgaccctcagggagttgcagacatctcctgttcactgcagggaaactgggtcattatgggtcatcatgggtcatcatgcacgcagggtgagtttaagggtaaagagtcttggtgcttatagtttaggcctctttcccttgggcagtgcaggtattattgccaagtggtactgtcctcctgaattctagatcattcctaggcttatggaacccttgggttagcagaaacctttatgatcaaagccaccttccttttatgggtgagaaggccggggctcagagagggtaagggactggcccaggatcatacagcaaatcattagcagagccagaaccagaacccacgcatttatgtttatgtccagctcagttctcacctgaacacagtaggccctcctcacctcccccgggatgcccaggcagatccagacagtttgggggccacttgtggtaaactgaggctccagcttgtgtctgggtggtggggtttgtgtcttctccatctcagtagctctcacagcccctagggccgttcctggcccactgagtggttagcaatcactgttgtgttgattgactagcccccttgcttctgaaacttgtaatcattagaacttgttgcattgtggtttaagcaaaccaaatatatgacaaatccacatttctttctgaattttctgatatgcaggaatggcaagacccaaggtctgtccaagtctaacttgtgccaatactcgggatgcaatcaggccaggacgctggccctgagtttctggtatctggacaggtgatttcggatgcccttcagggattccagcaggcccattttagggtcagaccatgaaagttttggacaaagacaatcaaggctgaagcagctcaggctggggcacgttttggactctgctcctgaatgtgttcctatggcccaccctgtcactgtgtgacctgggcaggtctcttcactcttggggagctgtcatagccccaaattcagagtgcaattggcaaatgcatggagctgagtgtgcacacagcagcctggggaaagccggcccatcaaaagggaccgccactaccacctagcttccatccattgcagccgcctaggagtgtgggccgagtttgtccaggttttcggagttttaaaagtcagaaaaaaaggaatccagttctttttaaaaatttgtctctgttgttggtaacaaattcaagttttcaaaacactttgtgtaaacacaagtgtgtgtgtggactggctggagctggggcctgtatttggtgattcctgagcacaggggcagacacagtgtgcatggtgtggggagggctctctgcaaggagtggccagtgcggccctgagctgcccccgggacagcctggtctggagtgtatgaggtgcaaatggcttggagcattgcaggtccctggccccacgcttctcctggccctgagttctcctgctgctgaatatggctgcgccacagggaggccagcgaccgttcctgactgcatggggtaaggccgttgctcagatgtgggcagcaatgcagaagtccctatcttctgggggaggcagtcaggatgcccctctgcaggcatctggttccaccttccttcctgtctccccggcacctgagttacagggtgcccacccatcctatcaatgtcggcagtggggatgagggaggggatggccaagttccatccttgtgggcagttggacgacccctccccacaccacttgggtaagggctgcttgggaaaacacttctgcctcctctgagtctgattctgccctcacgtgtagctgatccactgacttttctccccttcatttggtggaggtcctgatccttcaccatgctgactgaagctttctctgggctgcaactggacaggggcagttgacccagggcctacactgaccctgggacaggcagaaggacaagatgctttctgtggtatgaggccacctgctgagtgagagaaagtgtcagggctgccctgcccacctattgctcacctcttcctggtccagactcttctccttcctcaaagggagccaaagacctcagcttcccccatatgaagagtctgcgggtcagagaggcaagcaggtggcccagcatcttcagagctgggggaggagatcggggcaggcccccagatagctgctgagcatttccttctaccgaaagtaccacgcagcgagcttgggcgtagtgaaagtgcttgggaaggggtcggctcggctctgggcctcacctcctgttggcccctgcccggctcccttgatttctgtactctcccttcatcctgttcacatgcaacatggagtttctgtgtgtgtaatattatttgtttttatttctgtaatccctttattgtttgcacaactgctgtcagactgttgcctgaaagtatcacaggataattgcagaacgcctgcataagtaatttcttatgaaatcgggccttgtctgcatataaaattgttttttgttgctgcatgcatggactttattatatcgaggctgtttacagggcttgcacctttcccacaggccacagagatgggagtgtctgacgccaggaaataatgaaacacgatcagtattcttttttggtcagatgacatttctggaaggtgatagtcggtctgacgcggtcagaaagagcctggccttggaaggagggaaggcgtttgctgaaatggggactcggggtccgacttcccaggattctgctggggaagaccactggctaagcccgccttgcactgggcatttcttctgaccacatttctgcgatattaatggtgtgtggtagtgaaagaaatgtgttttattctcgagtctaaccctgctgttatcaaagtaacttccagcttattagcgacaaaggacttttctcctctctgctgccctgttcgccagggcttcctgaattaaactgctgtttcctgtcctttatatgcatgaccacatctgggtagcctgctcacagccctgctgcttaataacaatcaccttccctttcagtctctgttgattgtttctaattcactctgacagatagtgcctgacaacttgccggcttttccctccctccgtgacctgaagttactcacagcacttatatagtctgtcatttttaatatttgatttcattttaagttatgtgttttactgagaagatgaaaccaaaaaaaaaggggacttgtaatggaacataaatttaacccttcttgccattcggcacccgacgggagaactctccctgtgtgcctgggcgacagcttctccttttctggaatccttgatgctgctactgctgctggattttcttctctttccttccttctttttttctcttctttttcttttttcttttcttttctttttttttaagccttctttttttcacttctggaaacaaaagctttatgtcatatttttttccctttaatggggcttgattactttatggagctaattatggtgctttttgctttgtaatgagggtccaattgttagagatttggggggctttgctatggagggagggcatccggggagaggcctggtgaagtggaaatgactggcttccatgaaggcgtcaaacacgcgccatggacccttctttttggaggtctttctctttgtgccagctgttggtgcagagaaatgccacttctctctgggcttgggatgtgccactcagagtaggaccttccaaagagtggggaccaggtgggtggtggggttgagcctggacgtaaatttcttctgccacgttcactctgaatctgcccctgcgggcggcctggcaaggcaggcgtcctccagggtggggtgggtggggcgggcatcccacatcacttcagggtccactccgctgtgactttgccttttgtttgacataagacaaaggctcctgtgtccctcttggcccttcagaggtcgagagctgtgaggccgtgcattaggtcagctttgcaaatagacaccaccaactaaaaaaggaggcacattaacccatgacgcctcactgctgctgctggtcctactgtactgcgggtgtctgtctgtttcgcacagtggggcacgggcagttgagaaagtgcaggaagagagatctgggttggatctcagtttgaaacatttcaacttcaccatcgtccatggcccagcctccctggaaccaaagctcctctgagtctgggagctgccactctcaaggccctgtccaagggttttcagatacttgcagtggcaattgtgccaggggcagaggtgtgctagtcctccaggcagaggcgggcggctttcctagtgagctccggaagatgagagccgcatctcaacactttgttgtaaaggtagtcagctgggaacagcatgatgcagtctggtcctctaggaggccactttgcagaaagtactaggcctggactccaaagaagcaaagggcctccaggtagggctggctccactgtccatggtgcagacattctggccacttccctgctgttctacgactcttggctccaggcctgtggaaggaagtcgtgcaggggcagctactcctgtcttgacccagctactcccaccatgactcatttgcctggagagtttcctttgccaagcctactccttcaagaaccttggtccttgaaggacttccttccacaggcctggaatgtttgaggtttagcctccagcaaggccaaatcaagattttttctttctcctccccacaaaggactgttgggcttaccattggttcttggttcttgtttatgagtgtgagaggccaggggcagtggctcactcctataatcccagcactttgggaggccgatgtgggcagatcacaaagctgggagtttgagaccagcctggccaataaggtaaaaccccgtctctactaaaaatacaaaaattagccaggcgtgatggtgcgtgcctgtagtctcagctacttgggaggctgaggccagagaatcgcttgaacccgggaggcagaggttccagtgagccaagattgtgccactgcactccagcctgggcaacgcagcgagactccatctcaaaaaaaaaaaagtgtgagagaaattggggtttgaaattaaggaaaaactttgacgtggctctcgtgcagcaggtctttatgacgtggtgggctgggacaagctccctggaactctaggctgacaaaaggagggggacacagtatttcccgacctattccccacctgcccagagcgctgcaatccagatcttctgtgcacctagcatcggcagcatgtatgttcagttagcactgaagtctggatgaccctcggtggcactgctgttgtgaccccttgagttttctcaggaggcagcctatcaccagggctgtggattcgcggggacctgagaattcattgaaaactgacaactgagcctaaaaggacgttgcctgtagggaagtaaggtgcgcactttttcagtacactctgagctggcagaagcatacacagagcctggctactctacccggaaccaccatcctaggcaatgatgggctacagctacagacgggaagaacctacacatcacaaaccacatcgcaaagtagaacacaaccagtgccacctccgagattcaatggagagccatgaattctcaggcgagatggagagatcagttaataaaagcaataagaataaattgttgactgataataaaggagctaataattgttgtgcacttcctctgtgctcagcactgtgcaatcatttaaagagaggaaaaactgggctagttttgaggccaggaagagcttcatggaagggctggccttggagctggaccttgagagaccaggaaaatattcaccaatcgagatgggagaaggcaagagagaagcttcttgcagaaggcaggggtttgtcagatgcatttgcagatttaggagggggaattgaagtggtcattcccagcagatgcaagagagggggaatctggaaaaactgagggcagataggtgtgttggagaatgttaagcatctctgtttcattggaacttaggatacaggtgtgagatgtataggatatagcataagagcaggcaagcgtggaggtgtaggctggagccccacggtgaacaaagctgtgtgcccaattaaggtatttgtgactcactgggatatagccaagaatggagccgctagaaaaccatttgctgaactgacacagggaaagtgggaatgggagaaagagagtcaccctagccaggcacagaggctcatgtctgtaatcccagcattttgggaggctgaggtgggcagatcacttgagcctaggagttcaagaccagcttagacaacatagggagaccccatctctacaaaaatatacaaaaattagctgggcatggtggcgtgcacctgcaatcctagctactcgggaggctgaggtgggaggatggcttgagcccaggggtcagtgagccaagatcccaccattgcatgccaacttggatgacagagaaagatcctgtcttaaaaaataaaaataaaagagaatcacttcaccagcctcttgcagaacttgctgttgcctttctctcgattgaggcttatagtgactgcaggaagaaagatggaaattgggacaagctaagtttggggtgtccagaaagtgtccagcctgcacagggtgcattgcaggcagtcccagcacgctctcaggccagggcatgaactgtatacaagcaacttggccttaaggtaacagcaaaaagtgatgactctttagaaaagaaaaacaccctttatattcatcagggtcatatgcgtttttcttttcatatgtatacaaaagaggtactttgggtgatacaaggggtatatgccaatgtcaagagcaggcaagaacaatggaaaaattagcagattcatcagttctcctgcttatacttcagttccaagagtaaaatgttagtttgttcaactctgcgctttacgccttgatcacagtgtgaaaagtgttgactaagcttagcttcctggtcagagggtcaagacccgtggcttttaaacatgcttatatgaaatccaaacattcatggtcactagtgatctgaaatcaaggcacaacttatgaaatgaacacgtaattatcttgtttactcagggtataaatagagttcatgcattttaaaatttttcttcctgaaaaggacttgcgccagcatttggtctttagataggcatgtgctctctctctctctctgtctctctgatgctcttgttctttctcttcttcatctttttcctcctgtccctgttcctccccaaactttccttctcccctcccctctctgttgtctttctctcttccctctctcttcctccccctctctctcctttagaagggaagggacttgctagtgcttgttgcccctgcaagaggcaggaacagccattgcagttctttctaggagtatttcctgcttcccacacagctttggtggggggaagatgctgcccagggaatccctggtgtgcttgaacatagcattgccacttctatgaatgcaggcaagggccacgaagcccacgtctgcttcagacaacccagctgaccaccaggtcccgtgtagcaaggactcccgtggaggtaaccttcccaggcactccctgtgaggctctgcttctgcggggaatgagaggactgactccttagctctaagctggccacttccagcattcccacacctaattttggagtttttccagagtgagaaccacctgcttgtggactttaatagtttttaagtaggcacactttttcccataacatattatatttagctttgtcctggataataatagctacgaaatctctggttgaatttgccagttatatatttttcatatgaaacatcagaataattatataagccttcattttttaaaaaaaataggagtttctctatgtatcatctgaaatcttgctatgtgtctggtgatctctgtgcaactttggggcactgtttgggattttcatatctagctgggttcttggaatctagtgcaaggaagtcacccccgccgaacccctgaggaagccccacgtgaactcctccagcccacagtaagttctcctctgtcttcatggtccttccctttgaatccctaattgccatttaatcatatgccgctctggtcatatctgacaacactgtgagcggctgctgggcaatgctttctggctctgtcactttcccttctaaattgcaagactcttgagagtgggcaccatgttcttccgtgtcaggcaaagtgcctgatcaattgagctagctgtcagtctgtctatctgtctattatctacctatcatatctctatctatctatctatctatctatctatctatctatatctatctccttccttccttctttccttccttcctttattcatttcttcctttctccttctctccttcccttccttttctctctagatctatcatcttatctgtcaatctatctatgtatttagcatctctctatatacagatagatctatttacctttcttcctctctagatctatcatttgtctatctatctatctatctatctatctatctatctatctatctatcatctatccatctatcccctattttccctttccactccctctcttctctttcatcctacttgatgagccaggtactgtttttggccctgagaatgtagcagagaacaaaatagccacagtccctgccctcttgtagctgacattccagttggaggagtcaggcaataaatacataaatactattctataggaagaagctagaacaccatttgttagggcaaatgccacaccaagtgttcaaacagggggatctgaagctgagggactgagggctggctgagactgtgtgataagggaaggccctctggggaggagacactgagtcccatggagatggcagcacctggacagaggacacagcaggtgtaaaggccccagggcagtgacagcctggatgagtttgaggagcagaaagaaaatgcaataaaaggatgacacttatttggtttcaacttcgacaagggtcagtttttccatttctcacttgctaggggcagtggccccttttccatggaagaaagtctgacctctcacctctgaaagaccctccgccacatcccttctgctggggtgcttgggacgttccgtgctgttcccttgcagggttggagggtgggaggggagcgtgccgtggtgaggccaccgctgacatgctaatatttcattttaatcttgagtgccaggttacttcctgaatgaagtgtctcagacaaggctctaacttacatgaaataaaagagtttaatgctaattacacatcatctgactaccaaagccatatttattgatggcctaaaaacaccattgaggtggatggactgggtatctgtcttggctagaaatgcacctggagtccctttagactcctttgcaattcacacctgcacgccccatgcatggcaaagcccagggcatgtggatgtggagtgcggggagctggagcgatccctttggctttctctaccagctggatagatcagagccttcaatgcccatttgattcaggaagtctggggtggagcctgagctgctcacctttagcccctgggaagtgctggtgatgctggtcgcgtgacagcagcgcagtgagacatgagagtctggagtagctgaggggcgagcgctctctgatcttggctcctggcctcacagatcacagggaatgacaccgatgagtagagccttgcacttcaccgtcttgcctaccacctcgatctctctcttctccttttccttcttcctgtgtcccagtccttcctcctgcaccttcccatgtcggttttgctgtgggctctccaaggctaagcacagcattttctcatacttgttaaagtatccattgcacagctggaccaccatctcccaccctgtgccttggttctggtcgtctgaacttcatgcctggtctccccacctagactttgagccactgaagggcagagcctctgtccctccctcctactcctgtccctcctgggttcccagattcttcttgtgatgacaaggaagaagcatatactcccccactctctgcaaggagagactcatggagggcagagctggctgcagcagctacatgttgattgaaacgtggtggggtggggcccgaaacacaagtcgtgttcttccagtccatcctccagcttctccttagcgtatcttcttttgaccatatctttcctctcatcagcattctctgaatggtgcacactacggctgcaaaactctagttgccaaatgtgaagtgtcaccaaatcctctccctccatctgtctacacagaaacctcactacctcgcttgcctttgccctttgcaactgaagtcacacggacgtcctgctgatgtgcctgcgagggcaacagcatttccatcagtgtctgaggttgtgaccacctggagaaggcaccctggtggctgtccatggggaatgtgggtttaatgttgctagagctttggatttttcaagcaaaagcaggaatctctatttttacatgaaactcaacacgttgatgacccttacatatctttgcttaaattgccatgtgagccacacaagttatgagttggtggaattcagcgagcagacctcaaggtgtggcctctggtacaaaccaactgtagggaggattccatggattcgacagcggagaatctcaccgggtccaagggaggggactggtggaggctgagtcttcagctgctccgcttgcttggtgaaggattatcacatggaaagggctttgaggactcaggagccattttgcaaacgtagaccctgatgtggctctcaggcctcaggaaaactcattctttataccagcttgtctgtagcccacctataattagcatctgaaatttctaaatgaactgactgatccagtaaatttagcaaacttgttgtgaagtgttaccaactcgtctccctccaactgtccacgcagacgccacactaccttgcttgcctttgctctttggaactgaggtgcttatgtgcactgtctggcagccacgcagacatcccatttatgtgatctataatgagtttattagtgtttcactgccttgttgctattaagttttatcagtttcagcttcaagagcacaaggttaaattttcaatagagttttcgcaaagtttaagtgggattaagattgttaaaaatatgtccaaatggtggaaacatgtatttggtttgatgatactatttctgcccactcaaggattttgatctcttatttataaatgtaacacttttctgaaaaccagaatggtagcacagggctcggattttctttttgcaaatgaaacatgaatgcattaaatgtggaggatcacactgaagctgtgtcaattgagtccgacccgtctgcgattgtgcagtctagatgttgctgtcactgtcccggggtgtggtttttgactggctgttgctttgacctggcaaataaaaattgtaaaggaaaagacaaaattcttccacaaattgcaaagggatgaattatgacattattttctccctgtaccataagataagcaggttctcctctgaaaatacatgtgtgcataattgaatattgttaacctgggtctgttctgtaattcttgagcaatttttttttagaaggaaaccaactcaggagtttcttcagtggctgcaatcagaataaagtgtttccacttttagattaagagaaaaaaaaacagtaataggctgggctgttattatggaaagtttattattattggtacataagctagctgggggtttaagcacagagcagttggataatttagctagctcctggatccaattaaaaaaaatatatgttgtgtccacagtggggggatggccatcgctgagaaagcactctaacgtggatggtgacacacctgtggcattctcttggttatacgcagtttgggatgcagaatgctgtaaatcctctcattactgccttagagaaggcagacacttcaaacagttctccatttatctgagattaccagttaaactcgttaaaaagcaactatggcttgttcactcaattggctgttgggaagatttctgtgttctgtagcaatggcgacagcgtggctttgattagtggagtgctatactttttaggggagaccttttctaacttaatttatgactctggttgaatggcgtctgtgctggggtattacgtatttccccaactattgtacctgatgtcaataaaggtgcatttagggaaatttgaactaaaaccccagggtgtttttgttctttggggaaccaatgcgccataaacattttgaacttgagccaacaacctcccctgaccatgattgcaaattactgtagaatgtatggattgctggcggaacactatttgaggaaacctgtattttatagaatgtcacttttatgcacaatccaggcaaaacagaggggaaaaaaactaatttaaacagcagacagtgttctcttgaatgaagattatgacaaagaatgttataaaaatcaagctctaaatatggctttttatttaatcattattacatcaatcatcaatatcaatacttaacagcaagctgataatgtagccagtaggtgaaacagctattaaaaagtgtaaaaaaatgattaatcaggtacgggggatattaatgccctccaattattaaatgataagtacgtatttttggaagtgtttgtttttaataatcaactgtaatattagtttgcaaaaacgtaattgcttcttaattttgcattttagcttctttgtgctgggtacaaaggtagtatgtttctgtagttattgtttgcagcactccgtgtaaaaaatcacgttcatttcaagaagctgttatggtattgattgtggtaaagacttccattaactgaccaatctaaatctcataagtgatgtcaggatagttatgcatttgcttggttcaagtattcagccattatgttagaatgcaggcagtgtctgaatatggctgttaaattatttctaaataccgaaccagaacagcttaacagttctgcagtttgagactgacacaaaaatgacaatctgccacctctttgttttttaaatattaacgctgtattgggatagtatttttggagtaaaaacctgtggcacgagaggataagtgacataaacaaaggcagctgggcttcatgaaataatggaacaataaggcctttgcagccgctctcatcactccagtatgttaattagcattctgttgtggccgcaacactgaaaacatgtaatctgtattggtgtacagtacagctgtgaacacacattcttttttgtgagtccctggagttagccttgccattggcatatgcgtttgggccaaaagtcaagccatcaccactaaaatagcacaccatagcagcaaaatgtcatttgtcttttcttgtttttttttttttgttttttttttctctcccctcaatgccacatgctatccagtgatgtaatctagtatcactgcatctgcctccctgctgtatttttgcaggagggtatctggatatctgtaggggaaaggagggggcattgccagccagcaggagatggaaaaggcagcggccccaaaagagtcaaattagaaaataaattatttctttttgcattatatgtttaaatgcatatatagagaatatatatatatatatgcatatatatgtgtgtgtgtatatatataaagagagaatatatatacattgaagaatctatgcatttaatatctgccacctttttgcatagattcttccttaagtgtcatgaaactagaatccgctgcttgttttcgtaaggtaaaagaagggcagttaatttcagcaccaaggcttggaggaaatgagacctaagaaaaaagaatcagagtaaaatttacccttatttatcatttctatttagaactgggttgacagtctttcatgcatgtacttaggatgggattggctcttcccatttcagagctgacaaaactgaggctgaggcatggtccaaagatgggccctaattgcagggcctttctggcctctgtacagagagagtgaaaacaattggtcattttgagggaaaggggttagcaccagtgagcagaggcagttagtagctgggagcagtgactccagccttcagaggcaggactcagaaaggcctctcttgtgtgattttgctgctcacacgtggcctgctgggagccgcccctggtactgccgggacacggccctgggattttgctgaggccagctttggaacaggggaggtgagtctggagaagagagtttccacgttgtcatcataggatctggactcaagtgaccaaaaccttgcttggatttttacctgatgaagtttgtcttgaaaagtgaaaatggttccatttccattttccctgttctcaaggtaattcagctttctttgtgtgtgagtgtgtgagtgtgtgcaagtgtgtgtgcgtgcagtctccccagcatagaacacccacacatgcacccacccacatgcagacacgcacatactcatgcatggattcttgttcacgaagtacacacccttttgcaaaataatttttgaataaaaaattatagccctttaaatttattataatttagaaagggaccatccgatggttaaaacttttcctataattcctacattaattctctccatcacccgccccccccatctaatctgactgtaccaaaagatttgaaaacaaagcaaaaacaccaaccaaccaaacaaaacaacccacctgcttctaaagtaactttcagactccctgggcaaagattcttgtctctttctgaaagatgagcatgaattctgagctccaaattttgcttttaatctgtctccaacctaattgaaaaattaccataccacacaaagaaaactccgcatcgggatcaccatgctgatccaattgggttctgctttttgacgttagagaaatcaaattgtctggcgatttggtgacatgcttgaatgtccacctgggagaagactaggttaaaagttaatagcacttgtgcttttcttccccccgacctttttttaaactccagtagaacggaactcttccccactggccaggccctcatcctgaatcccttgtccagcctggaggtcttctgagagttctcagttggcacctttcccctgacttgtccctgtgaggtaaggcagggctgacactgagattttagttctgttgttcttttttttttcctagaaattcacaccccccaccccttggttaatggctctttaaatattgaaatgcctggaaaaacaaaacaaaataaaataaaatgcagcctgtcaaagaaataagaacaacaacaacaaaaatgttggtatcttttagaatgtgtcttcctagtggtaaaagtatataattaataggagaattttcctccagatgtggctatactataatagagccttataaatgctacagaaagaaaaattgcttggaacgaaggcgtcctcaatgagagcacacctgggtctgacaaagattgcatttagggactgctgtgctatcacaacgcagagaaagaccaagtctctgggagcagctggagagaaagccccggcaaatctgcatgcaaatagcagcacattgttaacttaatcagatgccgaggaaagatgtgccagaattccaggatgatctacacacacggaggaggagcggcctgagctgcagtgggagccggggccaaggtgggcctcagcaaggtgcacgcggcccggccccagccccagggccgcagcccacccgccgcccgcctgttttccgggcctgcagtcaattcaccacataatgcccgattcgctctttgcaaagatagaaacgatagagcgtatttcaatgggatggaagctttattattattattttttaatggtgatataggtatgggcattatttcgcctgagtccgtaactccaattaaataatatttctgcttaaatatccgggtgcatgaagataagaaatattgccctggagtgtataaagaaagagtttttttttcaataagaaaagtagttctctataggttgaagtgctgggtataaattgcaccttaagaagaagtggaagacacctgttatttatattttatattaatattaatggaaatatatatatcttaaatctccatcttttagtctagcaccgtaaaaaatataaagtaatactatttaatcacccacagcttaatagtgccttagttgtttactgccattgcactaattgctctgtactaatgtgtttttctgtgatatccagtagtgctaagagaacagagatccataaccaattaaatatagtgtttttttttaatgttaaaaatatatctggtgaggctagaaaaggaatagaaaccgccctgaagaaaggcgccttggcaccgcctcggtgcccaccagaaggtgcccggattgcctcttttgcgcaaagacaaagggggtaattttttggcaagaaaacaaacccaaggaaaacacaacaaactgagtgttgtttttttttctttccctcctgcaacttctcggaccgtctctgccctctctcctccagagagggcgagtttcatcctggagggaggccgggggagctgcgaggccacccccagccggcgcccgggcggattgcgagcccccgcgggtccggccgggggagcggagactggccccccgcccgggctggggcgcctgccgcccgcgagccggaagagcgccccattcacgagcaggcagccctggcagagggttaattgaggatcattgttgttggttccaggaggagcgaagcgcctggagatcgggcgcgcgggcgcggctctgggagcgggggaaggtgaggggaaatgggacatgatggcattaataatcgttaccaaagacggtgggagtaacaaaggaatgcgtctccgagacgccgcccagccccggggtgttttctggcgcggtcgcggtgcaggaacgcgagccccgccgccgagcctcccgccgcctgcgttcgttggcgcggcgcccggcggtagtgccaccccgaggccgagcgctgcccccgccggcccgcggctgccagccggccctgcccgcgcccgggccccgcgagcggccgcacttcaccttacggaggggagataatgagatcaattagaggcgccgtcaccgcgccggagacagctgccgccgcatagtaatcacccgcgggctgggtgcgcgggggctccccgctacctgcgcgcctgctgctcccaccacgcggcaccgacccgggcgcgcccccggcccctgtccgcagcccacagccacaccgcgcaccctacaccctccttgcgcctctgctggggagctcaccccctccactcgcacagtgcgctgcggcccggggtgtgggaggtcccgggacttggggtgtgagtgcctgtgtgggggtaggggcaggtgtccgcttgtgcgcatatgggcatgagtgtacatggcgtgtgcctggagatgggcgagtgcaggctggaatgtgccggcgtggcacgtgtgtgggcccaaatagatgcgtgtgtgatcacatgttgtgttcgtgtttgcacctcgtgtgcctgtgtgtccgtatttgagtgcttacaggaatgtgggtggtgagtacccgtatgtgggtgctatctgcacttgtatgcgtgtgtgtgtgtaggcgcgtgtgtgtgcgtgtgtgtgttagggatacgtgtagatgtgcattagtgtgactgtgtgtgctcatgtgcctgtgcacgtgtgtttgaggtttgtgtgcatgggtagcgtctgtgagagccatgtgtatatctgcatgggtgatgagtgtgtgaatgagtgtgcgcgggtgcccactccatgtgagtgtatgcccatgtgtgtgcttgatgtcttgagggtggggacagctgctgtagcgccctctccctcaaccccttgtcctctagtggctccatgggtaccaaggtttctttgccaggcagttgtccctgaggaaatttccagtgcccagtctccctggtccataccttggcatcccctctcccccaatccctatacacgcctttgttgagggtgatggtgatggtggctcttgacctccatctgtgtctttgccctggtgtatttgcctttgtcggctggccctgttccaccccgcagagggcgatggtgtctctgacctgagcatagaggtgccttgccatttgctccaccccagccccctgcctcccactacttataccagataatgaggctgggaacagccaccagagccctcacagacccagggtggtgcagcacctgtcaatttcacacagatagcacccactggatactccgtgggtctgggcagggcatctgctcactttcagaaacagaatgggccagggtctgaagaagagtgggaagcagctgtggtgggagtgagctgtggtgggagtgtcagtgagctcagggcctttgcatgggttgtttcctgcctggaggcacttttttcctgtgactctcagctccatggtgtgggttccctcttcagcacatcctccctgacactacccagccagtattcccattcagtcactcacattgtccagttgactcccttgactgccgcctggctcccccattaaagcacatgtgcctccccctgccccgaccccacccccaggctaggaccttaccttcgggttcattgctgcgcccagcatctggctggttctgtgtgcacagtgggtacggggcagatggccaacaggtgtttgcaggcctctgctacttggctgccctgtgggctcatagtccatcaggggaggctggcaggcatgctgggctagggacagggccatcctgacatggggaccctggaaggggatggagcttctctgtcatcgagagagccaacgtggcctgacactggggcaaagatgtgaaggagaaagaaaggggacaactgtctccagacttgcccactagactgaaggcctcatgagggcaggagcctggctcaggttctcgggaaagctggcagcccctctggtctcagagcctcgggatgtggtgggagtcctggatgttacccgtgtgggccgcgctcacagaactcattgtgttacaggaccccaccactcacccaaagttagcctttgggccaggggtttccacactatagtcgcttctgtggtcgccagaatgatgttacgggaaagaggtaccgatccagaccccaagagaggcttcctggatcttgtgtaagaaagaattcagggcgagtccgcagttcaaagcaaaagcaagtttattaagaaagtaaagtggtgaaagtacggctactcgtagacagagtagggcgttcaggaaagtaagaaaaggaatgagtccaccctaggtccaatgctcgtatatataggataaaaaagatcatggggagatgtgctctgctacaagggtttgtgaaaagggagtaattttcttaattactatattttgcaagaattgattttattatctttaaagcaaaattaggaatgcctttgttctcaagatattgggatattaggatactcccaaatctgggtctgttgagtaaccattatcaatctgctcccttaaccataaacatctagcagctaggaatacctcactttctgggaatgcagtccagcaggtctcagcctcattttacccagctcctattcaagatggagttgctctggttcacctgcctctgacagttgggtggattctttgttgcccaataggctcccaaggccaccctctccagctgctgggagtctaatttcaaccctgtctcctcaaatcttgtgcccctgaacaagtgatttggccttgctgatggtctcaacatggtctgagagtccctgtgctgtcttccctaatgccaaaatggacttggcaatgagtggaggcttcttagtcgccccagcctggatgccctaaccaagtttgggtctactttttatgtttttttaaagacaaattttcactcagtcacccaggctggagtgaagtggcacaatcttggctcactgcaaactgcctccgtggttcaagccattcttgtgcctcagcctctcaagtagctgggactacaggcatgagccaccatgcctggctaatttttgtatttttagtagaaatagggttttgccatgttggctagtctggtcttcaactcctgacctcaggtgatctgcctgccttggcctcccaaagtaatgggattacggatgtgagccaccatgtctggctaatttttatatttttagcagagatggggttttgccaggttggccaggttggtctcgaactcctgccacatttgggtcttcccacacatgctagtggtgctgaatcggggtggtttggctccatctgagataatgggaacatcctggctgctcttgaaagttctgccttagacccaactgcatctcccttgaggtctctgcccttcattgtcttctttccatctcctgcattgctccagccgaggtcccttttgctctaaaggagtgggacaggaacaaaaactggtgaactttcttacaggaaagaaaagcatgaaaccttgagtgccccttaacaaggtgggagatggcttgtctctgttctggacctcccgaagttgttcacttcaagttttgaccccctgagggcctcctgtgtgcaaaacgctgtgccagtgctggagggacaaaggtgtgggcctgtgtcttgtctctcccaaaggatgttgacaggggtctggatttcccagagtcccaggcataaggagtgtggggagggggtgatagctccagccctgtccaatgctttggtcctgaagatgggcagttggaaataacacatgtgccgtcaccttgaaaacctcggtcaaatattgtttgaaatatggaggtgatggttattatttttatgtcccaaatgtgatttgttttgaagtttgtgtattctcctgactagagctttcctgacaataccgtgggaaggtttgagtaaggcatccctctcccacttttgtttgtgagggtccagttggtcctggccacttcctgaatggcctctgtgttgggagctcccggtgaggataagaaagagaagccagcctgagctctgtgctgcccggcatgatgacagtgatgtggtcttgattctttgagcgtcagtcatggctcccaagtctggcaaaatggactcctggctgatgtcttctccactgagcctctgcaaccccagtgcgtcatgggggtgtgttgaatgctttctgtggggttgattcctgtcgccataaggaggatggggtggggcagggatgtatcatcgttgccaggagatctgacaggtggaaggggtgaagggtggagaggatcatgggtgaggaccagaaaaggaggggtggggcttgagggtagacaagcagaagggctggggggtgtagtgggtatgcggtgggaggtgggacgatgcccaagtaggctgctcaggggtggtgcagggtggatgaagggaagagatgccataggtgggagtactcattccactggctgcaggggatgctgtaaggggtgctgatgcagctttgcaaagccaccaaggcatgcctgggacctcctgtgactgcccgtcactcaggagctttctctgtgccaggcactgtgctaagtgccctacttaccttgcctaatttcatcttcactggggaagtcctggcgaaggagctgaggcttttgatctgtgaatgagagagctcagatccagaggggtaaaaatttgccagatgtcacagagctggccagtgatggagcagggacttctgagcccaggccaccaccgccgaggacatggccactcttcgtgtttcctgcacagagcagctccagcagggagctgagctgaagaccccaacagaagaagtcaaggcaaaatatagcccaagtcctagtgcattcttcagggagggcctttctgtgaaaacagatttttttttttgccagccgtcagccttttgtcccattttcacatggcccaattagacaattgcaccccctaattagccagccttaggcactacttgttgcctgcatagaaattcacacatggggttaaacgttggcaggaaacttcgtccttgcaaatgggagccgtggtgtcagtgttggagacgggccaccctgcagtgcatggcccagaccatgctaaacccagccaggcccacgagcacccccggagaacccacggctcggccctgagacactgtgaggccacgtgaatctgagttatcagtggccaaaaaagaggggagacacagaagagtcataaatgttaacttttttagcactctgtaattccaaagtgattcaactgatttgtttcaaactctgcaggaaaacccagctgtggcatcagatgtgagccctctcagaccagaaggaaatctcttgcccttcgatgcttagccttaaggcagtgagagggaggaagctgtgttctgatttcccttagaagtgcagcttcctgaaggaggagtgtgtggcattttccagaagactcaggtctggctgcttctcagcaaggaatggtcctgagtccacccaggtgcccgatgcgtgtttcttatttattttaaaataaatttatttatctaaatttatatattgttacatatttttaatttttaattttagagacaggggctcactctgtcacccaggctggagtgcagccatgcaatcaccgctcactgcagcctccaactcctgggctcaggtgatcctctggcctcagcctcctgagtagctgggactgcaggcatgcaccaccatactcagctaattttaaaatttttttgtagagacagggtcttgctatgttgcccaagttggtcttgaactcctggcctcaagctatcctcctacttcagcctaccaaagcactgggattacaggtgtgagccaccaccatgcctggtctatatatatctaataatcagcacaaaccatgcccccagagggagctaatatctcttgattagatcaatgctcctttgcatctcctatgtgccaggcactgtgctggggactgggtgacaggcaagttccttgtttaagttatggggagggagaaggcaggggtggatagaggctacacagtcacctcatacatgaacaggattattcccactggaaaaaagtggaatgtggcagggacagggtgcctcattcagatggggtggtcttgggaggcctctctaaggaagtgacgcttgatctgggactggcatgggaagatggagccaggcttccagacagtgggatcttgcagggcacaggtcccaaggaaggaacaggcctggcacgctggaggatttggggctggagcatgagggaccagggaggtgagatgggaaattaggccataatggccccaggtcccagagcctttgcaccattgcaggctggggcaaggggctaattccaagggccataggaagcctcaaagggtatggatgcggggtggttgatggggaacgttgtaaacaggctttctttccatggcaggggacagtgcaagggacagaagcgttcagagtctgcagggaggtggagctgaccggagcgatctatgtggttctgtgtatttcatctcttggcctgtgtgtccccatcctaatatccttgaagtatcaaagcattgctaaataaatacccatgaagtttgctacaggggaagccagcaaaaagttcttaatttaaattcttgttttggaagagaacaagcagagagaagagaatgctttccattccctggtttaagtctcaatgaaaatggccatgtgagacattttgggtaaaaatgaccttctttggctcccattttggctgatgtgttcacttcttttccacggattgctacctcccctccctgctgcccccgcctgcaaagagacagctctgcatccatgtcccatttccgtgttatggctagcgacagacacagttattagaagaaagttgtccgatttgaattaagcataaacatgtcagcttagtggtctggacaccttgtaagtccttgtgcatcatctgtgcaaagctcttatttgatggtttgatgaagtttcggcaactgcatggtctatccagtgcctcccgtgctttttctccaagacatttgggtggaaaatccacaaaacaataatagatcaatacatttaaattagaactttcaaaaattcaataatggtatttacaaattaataaagcactgtaaagaaaatatctgcacttctttatttagggatacagttaattttttcattgattaagcattcttttggtggatgggatgtgggcagggaattttttttttttctaagaaggaagttctgtgtgaaaactagaagtatttgcgtgtttttggtcccacttgtaagttactaatgcatcacccagacaaaggccgatagtgagggaaggaagtatggcttggcttggcagaagctaccgcagaggtggaatccactggatcccatgtgatctacatggttgtgatgaggatggagggaagggcaggtgtacaaattcctgcggtgggcggctctgacttctgaagcacacaggtgttaactgtgtgaaggaaatttggtataggaaattatcatttagcaaacataaaccagggagctactcttctttgtgcaaaagaatttcccatagaaatccttaaaattagcccagatagtcttgcacaattaaaatcaaatatatttctttttctcctcctaaaaacaacaaacgtggcaggtgtggtggtccacgcctgcaagcccagcactttggaaggtcaaggtgggcggatcacctgaggtcgggagttcgagaccagtctggttaacatggtgaaacccagtctctacgaaatgtataaaacttagctgggcatggtgctgggcacctgtaatcccagctactcgggaggctgaggcaggagaattgcttgaacccaggaggcggaggttgcagtgagctgagaccatgccactgcactccagcctgggcagcagaatgagactctgtctcaaaaacaaagaaacaaacaaacaaaaaaaacaaatgcaactcaggttttcaagactatgcctcctgtatccaggaaggtagatctgtaccttgctaaggtctggggtctgcccagttcagatggtgaacaactgagaaagagttgctgacaagttccaggaggccctgtggaggtggctgcaccccaccaaccactctgctagctggatgtggacacagcctaaaccacgtacacacctgcatgcctgtggcccagggcctgctactcacttactcctcccctttatcctctcttcttctgcccaccttccttcctttctttctctctttctctttctttcttcctttcttccttcctttctttctctctttctctttctttcttcctttcttccttcctttcttttctttctctttctttctttctttctttctttctttctttctttctttctctttctttctttctctttctttctttcttttctttctttctttcttttctttcttttctctttctttctctctttctttctttctccttctttccttccttccttccttccttccttccttccttcctcccccctccctcccttccttctttctttctttcctttcttcctttcccttcccttcccttcccttccctcccctcccctcccctccccttcccttccttcttccactctgccagctggatgtggacacagcctaaaccacatacaccacctgcatgcctgtggccccacggtctgctactcacttactcctcccctttatcctctcttcttctgcccacctctttctctttctttctttctttctttctttctttctttctttctttctttctttctttctttctttctttcgtttccttctttctttctttctccttccttccttccttccatcctccctccctccctccctccctcccttccttctttcctccctccctccctttcttctttctttctttcctttcctcccttccctttccttcccctcccctcccctcccttcccctcccctcccctcccctcccctccccttcccttcccttccttcctttctttctttcccaaaatattgattaaggacccatggcagaccacaggctgtgttaatgctgggggcctggtggcgaagaaggtgtcatggccaagaccctcttgtggatgcacgatcccagtgggctggcacaaagtggacacccagtgcttttcctattgaatcatgtcctgggtgggaccctgctttggttgcatgggaccttcaggcatcgatgtgggtctggacacaggattcttcttcctgcattggatggaaaccagaaacccctgtggagcatgagggtcaaaggtcatccacttcttgcaccctgagggttgagagaggaggaatggcttggaataggggtaccaaatggtgtttagaaaatatgtgttcagccaggcatggtggcttacatctttaatctcagtgctttgggaggccaaggtgggaggattgcttaaggccaggagtttgagactagcctgggcaacagagcaagacactatctccacaaaaataaaataattagccaggcgtggtggcatagcctgtaatcccagctactcaggaggctgaggtgggaggatcccttgagcccaggcagtcgaggctgcagtttgatcacgtcactgccctccagcctgggcgacagagtgagatattgtctctaaaacaaaaaaaaaagcaaacaaaaaacccagctccacctcccattggttgccagtccttgtcacctgcaggataaaggtctaacacccggacttgatgtttgaggccttccctgcagcagctgccccaggcatccttctctttcattcagggtaggaagggcctttccaggagcaggagcagccctgaaatcgggtggaaatggacatgaggaaggaagagccggtggtggagtttgtctagcaaccgcccagagactgagggaggtgatgacccgatgggggtcagtgtgggttgtggtggctgaagcgggaccaggggccacctgcctggggcctgggtgccctgggaagcagtgctggttgcactggggggacagctgcctgacgggtgtctccctgtgggctgggtaacgaccgttaccctggttgcagtgcttcctctcttctcctggagttcctgactgtcctctgtggccttgtcctcattgctcttccctgcttcacccactggttccagtccttgtcacctgcaggataaaggttaacatccggacttgacattcaaggcatctccccaggcatccttctccttcttccagaccctgcatgacaagctgccatctcccagggaatgggcaggacacacctgtccacccctgcgtcttggcttttattattccttctacccatattccacctacttctccccaacttttcagacttgatggtttaccccaggtgcaactccgcctccatcatgaatctcctgtcttctgaaatctgcatgtgcgcactgcctggaggtcccttcagtgatgctgctttgggtccccagctgggtggagccacagccacatagagcatctggtgcttagtgggaccccatggagttatctgaaggagtggcagtgcctggatcactgagctggcagatggacatcagggatcatgtggcaatgtccgtctgtctcactcctaacttaaacttcgattttaaaaaatgtggcccagaacattctgatgtcagctggtgttgcatccaaggcccctcaatactggtcccatcccaccttcccagcttcatctcaggcaacatcctcccatccctcagccctttgcctacgctgtcttagaaagccagccactttttctccttcatctccactccagaaaactccctttcatcctgcaagagccagctgaaaactcacctcactacagaagccaattctcacgctgctctgagtggagttagcccctcactcagctgagctttcatctctgttacctgtgactcttctgaccatgttattgtctctctacagtctctctttatgaatgtctgcccctcctgtctcttacctccttttttgagatagggtctcactctgtcacccaggctggagtgcagtggagtgatcatgggtcactgaagagtcgacctctctgggctcaggtgatcctcctacctcagcctctcaagtagctggtactacagatgcatgccacaatgcctggctatattttaaatgtttggtagagagggggtctcagtatgttccccaggctgttcttgaactccagagctcgagcaatcctcctgccttggcctcccaaaatgttgggattataggcgtgagccatgatgcctggcctcttgtctcttctgacatgtagtgggtctttggtctacatttgccaacctcaatatctgtaggtccctagggcagggcctggcgcacagccagggctataggtattaggtatttatttgtggctttcaggaaccgatttttggtgaaagacacttggaaattagccctgcgtttcacagaacacttctattacagcggaaacagtggcagtgcttgtctgcgggtcgccggcatggacagcaggggactgcttccgagggcttatccaaagtcacagcctatcagcaatttttaagataacacattgacatctgtgtgtttaagattctggtaaaaagatgctagaggaagcaatgtgcagacgagagtcggtctgtttgatgtgtgattgaagtgtcagtggagacacacagagaaaaggtgtttggtcaaagatgaagcaccgttttcatgctgaagatctgccctcactcatgggctccaatgtcccttggctagaacctgtccaggcctcagtatggtaccagagggaggcctggatgtggggagaaaggcaggtgcttagctgatacttgcaaaggaaaatttgcaaaaggggctgtaacagagctgtcgctggttgcagcctgactttgaatcttgctctgagcaggaccgtggggacccgagacttctgcagcccctggttgctgtgggctgggccccaaagaccccattcagggaggctgatgcaggggccatgcttgagagatgcccagaacctgccctcccatggttgacggcggtgagggacccactgcctctttccaagccatttattgccacttaccacgagcttggcttacatctgctgctgagagcagagcgatcccaatttggaagccgtggaggccgtttttcacccacactgacataagccatgactctcgaagctgatgacacacttgagataaggtcaaatgctcaacagaaagggacatttgttgcttaatccctgtttgcagagaggctgcagacactaatggctggaggaatatgtggtccttgtccccaggggacctggctggaaggcagggccctctccactccatcgcttggaaactacttaccctactgcacaggatatcagggaagaggcttggaaagcccagcctagagaggggacttagaccctgcttgagggatggggttggggaatgttctcgagacgcaggtgtccaggctggttggtcagtgggctttgggccctggagggggctgtgtgatgagccaggcaccagctgggtgtctgtgtagataggatggtccataggtggagccccttagaggtcttcttcctgcttcccatgtaatctcctgtggctctcagattttgaggtcaggttttgaggctgtaagaggtgctgatttggccaggatataagtactgggagaaacacgaggggaaaagaaaagacaagggtgtgtctataagatttcccgggggagtgagtcagaatgaacggtggcctacttcagtcaacctgagttaagataaagaagaccatggatcgccttggcctgggacctcggtcaaagtatccgtatggatttcctttctgggtcttggtgctgttgagggaggtcatgtgactttgcctaaatcaagttagatctttctacaattatggatactcggtggggttaggcagggggcttggaggcaccctccagaagccttaatgggggcgaccccgctcctccagccattgtgaccactttgtagggtttattgccccagccctcatggtccactggaaggtgggagttccaccccacagagaccacccagcggtggccatgcccggggcttgccatccaggtgcagagccctccacgatcgcctcgtccctcctgtgcttggcagggcttcttcaacttcttcacttgggggaattttccagggcaagccagtgttgtaggtctaaaccctcacggtgttttcttgcatgccaaggctgttgggagaagctgaatgtgctgttatcaagagaccagttctttagaaacaaatgctatgattttcagaattaggatggagtgtaagattccttctttcttggttaatttatagtagccaatgggaagacagagagagattcctttatgggcttcctccactttccaggcttaaaatcatgtgctgggcccttctacatctcattcagacagctggcaatggccatttatgtagggtgagctgaccaactgcagagggctctatttcctggaattctcccctacaaagcaagtgtagccccttcaggaggtgtaaaggcttgacgacctgtgaggaaggagggagtcccatgccccatctctcttgatttaccaggctcctcttaccatgagccagagaacacaagactgagtgtcaggcctgcctgtttcctttccttgggtgtgggacccccctagtgtgagttcacccagtccgcacacgttccacgtgcctccacgaagccaggcctggttctccaatttccaagtagagttctggtttgcgcagcttttctactcaaagggggtatgcggaaggccaaccatgtggttggtgatactcgtgtatagggtacatttggggagaggtttcctgggagggcgagcacttgcatagagggttatcttagtgcccttgaaaaatctagcgaccatagatgggaccttgcctctcctctactctggacacgagacccttgtaaaaaaaaattccctttttgctcaagatacatgctcctcacccatggatttttaaaaaatcttgtccatgcttcacagctcagaaatctcttaacctgttcagtacagatacgactagtaatgatttgtccccaggggctgtattatggtgacactcatcatgggccattctctgcctttctcattcatgagaaagttccagactgggctaagcgaaggccaagaccagaacccttgaaggtactggcccagaaaatgtcctttgggtgaagaagtggtggtgcccttggctcctgaatcctagcagattctttttctagggactccatttctgtcccgcctaatagcatcctgctggcccaagcagatagcagagagctgctgtgggcccctccagctccctatcttccagaagggccacttggctgctgagtgtggcgcagtgacattttccaacttgagctgctaaggtctctagaaaaagatttttccagcagaattagagaggaaagaaggcttgctgtttctgatatgttttacctaagatttctcaaatggctgctgggatcccaactcctcccagggatttccctcctcaaagatatcttggtagatattcaatgggggacctcagaggtgttcaaggaaggactccatctccattgaggcaggtgctgtgcaggggaaggttttactccttcctaagcacttactgttgcctgaatctacttcctaggggttagctgcaggggggttaaggttgtgttgagtagagagaagagaagagaagcctgctaatttgctttttttcctttactttaatctttagttcagctgcccttagtataaactggaacttataaaataaaaaaatgctagggacttctcctctttctctgttaataagctcgcatgctgaaaaaggtctagatgagaagaaaaggaagcccaagtgagagtagcattaaataaaactctttagggtgaggtgggaccagggtggcaggcagctgcaggggagtttcagtgctagaaagtggagttgaactctccaaagggaaaggctggaggggctgaagtgagtacaggctccccagcccctatgctggtccccacttggccatgccaatcttcctagccaggctctttgagagcaaatcccacattctgccggagagctggaaatccagtcttcttgaggtctgaaggtgcttttatgtttccaaatctatcggagcctggagtgtcctctgtagcccttagaaacagtccatggcaaagtcagggatccccactggcagagcaggaggcaggcagccccgtgagcttactggaggattctaatcaagtgactgggaggccggagctcttggcatcaccgccagcccccgcccccatgtttacactcagcccccgttggcaccaatggggatctcaaacccagcctgggaccttgggagcatctattccaatgtcagaataaacagaaatccccacttgagagtgttatgaatcttctcaacacagcactttataaacctcgggggctacgtgcccttgagtgctggcagcattaatatttattcactagggaccaagttttgcctgcagaagcccatgctggtgcctggaaattctcctgtgatcagagccagaggcagagtcccagctcttgcactgcacatacctgggaaggtggttaggagcaggcctggaatccctcccaacacggccaaatcactcactgccactttgtccctgaggaattccaaaacacaataccacaggatgtcttgcccatttctgatcccaggtccaaagggcccaccttctgccccacatctgtcccagtagacttgactttaaactgcttttgctggctggctgcagtggtgcacacctgtaatcccagcactttgggaggccgaggtgggtcgatcatctgaggtcaggagtttgagactggtctgaccaacatcgtgaaaccccatctctactaaatacaaaaaaatagccgggcatggtggtgcatgcctgtaatctcagctacttgggaggctgaggcaagagaatctcttgaagccgggaggcggaggttgcagtgagctgagatcgcaccattgcactccagcctgggcaacaagagtgaaagtctgtctcaaaaaacaaacaaacaaacaatcaaaaaaactgcttttgttcagggtgaactttattcctggcgcttaattgtaaagaatgataaagtccaggatagaccacagagcgatctgagaaagaccaagagaaagagagaaaaaggtaaaggcacacacagaaaaagaaaaacatgctttcaaattcactgacaaacagcatcttccactaaactttcccttgttctgattgtaactcccagccaccccttagctagctgtctttgaattataattgcctctcaaactcctggtactgtaaccttaaaccttgtaattgtgccccaggacaaatcagtactaatttagctaatgcagtacgtcttagacatctctctagcctccactttgaataaggatatcctccccccttcacccccgccaaaaaaagtgtattttaggaccgatgaagcaagtgtgcatggattctaggttgcggttctcggatgtccggagctgggggccagaggagaggggaggtgctcagcttccaggactctgaggggagaagggagtgagtgtctcctctttcacagccctgggaggactctcagccacaccctttcccttgggaattccagtccttcctaggggaggcccagcgctctcatgggtctcctctagaatttgcaggaaaccagtaggaaaccacagatcccctggggcgagggaggtagggacagaaagattgtgcggttgaatctaaaatatgaagggaggttaggagcagccgccaaagggattccattaaggagaccacagaatttagccttatgaagttcatgcccatgtggagacaacgccagggtagccagagaagggttggaagggctgggatgtagaatccgtgccctgcaccaccgcccggcagcaattatctgcggttagctggttactccgagctgccaactcctgaatgccacggcctcccaactgagcctgagacatggcattttctgagccagtcctccttctttctgtgtgatttccattttttctagggtgtctctgttcttagaagtacatcagataactgctcttaagtgagctaaaattaagctcccaaacaaagagttatgagtgctgttttatttctagagatgaaaattgcacgagtaacttatttatttgactacattacattacagtagaaggaaggagaggactgtggtgcaaaacagtaattaactgttttttctctgtcctgaaaattagtgcatagttagatcaaaatatgacagggtgcacgctcatttaattttttaaattgcttggtaacttcaaataaaaccactgctgtggatctgtaggactgtgtgaatgctgaatactcaatggcattttggaaaccacttctgtatgatctgtatggcacaagatgatagcattcattcatttatctggtcagcaaatattaacgacacctactgtgtgaagctgtctctggggagcagtcatgcgcgctggggaattatgtgagtccaagatgctgaggaacaagaacaatcccctgtatcatttattcgtccatccactcattcattcactcaacaaccacttaggcaacttcatttctgtgttgaggttcctgctcacagtttaatgcggtaggatggggttgggggcgggggagaggaaatgagaactaccaggatacatatgagtcactgaggcttgtttgctgatctgatcaaaagaagcacatgcaaagccatccaagaagagggtctgattcattcatttcttcctatgctcactgattaattcactcattccaaagagtttattgaagacctactgtgccctgcagataggatgatgagtgaaatagacttgatccctctctttatggagcttacagtctggagagaggggcagatgttcgtcagagaatcacatgaaccaatgtgaaatcattagtctggcaggtgccttaaggagaggtgtctggagctcacggagcctctggtcctaggctaggggcagcgtcacattctcaggcaggggttacatggaaacatctcagggaagagcgttccaggcagagggaacagcaagtgcacagaccctgtggcagatggaacttggtgaagatgaaggctgaaaggtgggcagagtgaggctagaggcacagaggaaggggaagctgtgagctgagctggagagaaagattgaggcgacgccacagaggccttgatgaaggattttaggctttatctgaaaagcagtgggtaaagccatcatgtaatgtgaatgttgtttaaggggcaatgtgggcagaatggaagcctgggtgtttggtggtgttggacagggcagtggtggaggagatagagagaaagcagatgtgaaacatgtgtgggaagagctgcctttggtccagagatggaagctgaaggagtcagagtctgcagggctagatgggcaggcagagacagtagggaagggcacgtgcagatggaaaaagggcagctctctatcagatcagtgagcaagcctcagtgactcacactggaggccacaagacctgtaacaatgaacacacgggacccccttggatggttccttaattggtggtccaagacttttccttaaacgactttccttttctccttcttgtgttatagaattgctgaaattttctgaagccagtccaacaggtgtgcccacctattgcctacttatccgtgatgaacccttacacattgggt
